United States Patent Application Publication US 2008/0274467 A1 - sequence listing, part 12

SEQ ID NO: 1566 - DNA, 879276 bp, Mus musculus
  misc_feature (1)...(879276): n = A,T,C or G
cctcataaacattaacctatatcctaacgttgccaatgactgtgtgtacagtggttcataaattctaaaacatgcacatgtttttgtatttgttgctagggttgctaggtagaaaaaccacaatttggcctaacagcagatattttttcacagttctggcggctggaagtccaggactaagtcagcaagaatggtttcttctgaggctagtctcattatgagaggtgactatagcctatattgtaaaagtacatttggattttatactgtagtcatctacatatacaccatctgaagtatttagagtcttagaaaaatcccagcttgtcaaaaaacctccctctagctcaattctctcttctgtagcactatttgttcctcaatgaaagttctacaagagtgagcagctttttatattgtgccctttatcaagaactgaacctggcataccttcttctctatttaatgagcaaacaccaacctgtgtatacagatgttaaaagacaagtgcaagatgggaaatgggtccttggatatcaaattagcataaaaccagaatataactgcacagaattaatcaaagacatccaatatactttataagaacaagatgtaggttgccaaggacacattcacctagaaaagtagttaataaaagtgccatatagtccacttcagatctagtcatatgaccaacacatagacaaactagctgatcagaaagtttacttttcagctgggcggtggtggtgcatgcctttaattccagcacttggaaggcagaggcaggcagatttctgagtttgaggccagcctggtctacaaagtgagttccaggacagccagggctacacagagaaaccctgtatcggaaaaaaaaaaaattcatttttcaatgtgggtaatcagtatgcagttcaaacagtattattctaatcttattatcttaatggaatttttttttaactttcaaatttaatgattcttttctatcactgtatagtggtgttgatagaactagttagatatatcttaataatagtggctcatggagagctgtttatttagacttgaaaaaaaaatcatatagaggcttttggattccagtttcaatttgtcttcctaaggaatctcaatatgtacctttaaggcctgggggtgctcgatggttaagtgcaattttagactgggacagaaaaagattataaacctcattattatttaaatataagacaggaaggagagatgcagaggtgaaaactaagggacttgaatctctcctttccattaggttgctgagggaagtctatcagtattattgtcttcaggagggaagagtctattggaaaacaagatcaaagcaggagagcatacaaccaccaccacaagagaaacagagaggtgataacatcacctgggccctggacttatactggatatttggtattcaagtaaaaaactaagttggactttcctgaatgttacaacctgaagaattctgaaatagaacggggttacagcagctattgacacaatcacatttcttatatttcccatttattggccatccactgaggcatcttgctgaaccatttttctgaactgtttattaggaatacaacttctataatcaaaaacagcaaacgtggctggagagatggcttagcagttctgaacagtagctgcttttccaggggacaattgacagcatcaacacagtggcccacaactcttattccagggaatccaatgctctcttctggcttcagctggcactacaccatggccagcatgtcatcagtatttcctttttgacattgtaataggtatgcaatggtacactgttgttttgaaagtgtcttctagcccatggcttgacctccgattctgttcgattgagactgcttatgtagccctggttggaaattgacgtgtagagcagagtggcctcaaactcacaaggatcatcctcccacccctgcctttagaggcatgtattactatctccaactgtcttcattttcttaagcatctttcactgagcagagtatgttatttttccttttgttcattttggtttttttcagacagggtttctctgtatgtagctttgtctatcctggaactcactctgtagacaaggttggcccttaaactcatagaaatctgcctgcttctgcctcttgagtgctgggattaagggcatgtgtcaccactacccagatgaagcagatatttctgtgaggtccaacttccaactctcttttatgaatcaggctttggtgttttattttaaagtcaacaccaatccaaaggtcaaccaaattttctttcctcctcttacttcttgtaaacagtaacaggtagactgaagagagaaaaacttacttttgacaatctcatacatggtatactatatcttggtttttatccatcccctgctagctcccatcactttccttccatctcttatcttcatgtctcttaaaagttgcttttaattcagtaagtccaattatgcatacttatgtgaagtcttacactgagatttggggaacctactaaaccctgcccctcaaaaaagtgacttttcaaagttttgtattttgtatcctccattatcattatctataatttcattccctcactagtcatcaactgtcattagcccctcagctgagtgaagtacccagagccctccccactccccaggtggaattttaagtgcatgggtgttttgcctgcacaaacacactcacagtgaatgaagtgttggtggaggccaacagagggcttagggtcccatgggattggaaaaacatctggttataagccacatagctgctgggaaaagaatcccagcgatggcatggaagagcaaccaatgctcttccagtgggccttctctccagctccaatgctacaattttattctttatcttacactggtatccacactgtaataaattcatgcatgtagcagctatgccatgtccagagatcagtgtctcacactctccttccgttctgattttaaatcctttctccattttcctcagtgttcttgagccttgggaacttggttgatactacacatattctatctatagctgataagtagtcacagacccttattctcagcacttgaatagctaatggatctctacattaacttctactctgtaataagaagcttctctgaccatatttaaaaatagcacatatctgttggtatcagaagctgggtgaataagcagaacttgaggcagaatgcttaagatctctggttttcttttaagacttgttgaatttgcctgcatgagtatatgatcagataaagcagtgtttttctacatgtgggttgcaaccactttgggaggatcaactgaccctttcatgggaactatatatcagccatcctgtatatcagatatttacattacaattcataactagcaaacttacagttataaagtagtaatgaaataattttatatgtgtgtgtgtggtcatcacaacgtgagaaactgtattcaaggtttacagcattaggaaggttgagagccactactctacaattacagaggattgtgagttgctatatacatgctgggtatgaagcccacatttgtgagagcagccagtgctcataactgctgagccatctctccagcccctcatattctgttagcctcttttgtaggttcatagtctgttgaactcgctattttaagtcttttgatttcacaattaaacttcagattcaatggggccagtaaggtggcttgagcaggtgacggctgtcttcaagccagataatccgagttggaacccacataggagagaatcaagtcccccaagttgtcccctgacctctacatttgcaccatggcacatgtatgcaaccccagattaaataagtatccttgatttaaaaagttagaatccatttatccaacttcctaggaatagtaaaaatatgaaactggtctatctaggtttttaccaaaatgaagaatggctaaagaaactgtgacatatacacactagcaagatatttattcagtcacaaaaccccatgaaatcctgtcatttgtggcaaaatgggtgagcctggataggtttttggttttttggatggagtcttattatgtagctctggctgcccaagctggcctcaagagatccaactgtctctgctttccaggtgctgggattacaagcacacctaatcttttgaatggcattaagtagtgaaacgaggaaagcataaatactgtattctcatttagatgtagaattttaaaagggtcatcacagctgggaaggacatttaggagacagccggctaacaaaacagaaatgtggctgggcaggaagagtaactataaaagcacagtagggtgactatggctgttaactttgaaaactagtgtttaaaataagggccaaaaaaaaaaaaaaaaaaaaaaaagacaaacatcattaaaccaacactcccatctcctttacttgacaaaacatctgaattctgaacatttccatatgcaatgtaacagctggaatgaacacattttactcatagtaaaaaaaattaaattgtgatactcctttaaccaagacagtaggaaatgtttgataaagttcaagacccactctcacgatagggaagcagcaaaatactctgtaagaacatatgggacttgaaatattgttgggtacatttttggaaaacaaatcttgctttttcttttgtaaaatgtgataaagattaataaggaaatggctgttattcccttgatcacaggcatcttaagttcatctaagggtatgatgtagggttttgggaattaagaatctgaatttggattttcgtaaattatcatgcctacctatcccttggaacgttacctcaaaagaattcataatctcatttagagacaatgctaatatatagactatactcttgtttaaaacccatttatgagatgtaaaggtctatacatttttctaaaaagttattcagcttttctttcttgtttttgttttactaagggtctcactatgtagctcttgctgtcccagacttcactatatagactaggctgacctcaaatttagaaattcacctgacatctgaagggttgggatcaaaggtatgcaccattaagctcagctcaagaacccttcttaaaatatacagtgtggtggcacactcccagcactatggaggcaaaggcaggcagatctctttttgagttcaaggctggcctgacctacatcgtgagtttcaggtaaaccaggattacatagcttatctcaatgcaaaaactaagcaaaactccattaaaaacctaattctgaatacatgactaatagtgtatgcagttttgctgaggacaaagttttttttttttcttaaaaagtcagaggttagatagacccctgaaagtagatgttaacagaatttaaaaatgaaacattaggttgtatttgaatgtcttccaaacatggtacaaatgcaacacataaaactttccctaacttcattattgccaggctggcttgacctcataatcgagtcagctcagcttctggagtagctgcgattacagccatgtaaaattgtgtctggctttaattttttcatttttgctaataacatactttctaagagactgtttagtaattgttttcaagtgttattttttatttatgaatttcaataagtatcaaatataaaatatatggaaaaaaacccaagatgttgagtatggacgttttctttcaaatagccacataacatccctctattaacccctttacacatgagactaggcagagcaatataacagttacaaccagaattcatgtattgattaaacatttacttagtgcccgttattttataggcagtattctaaaaactcagaatatagggttaaatgaagacaagtactatgaatttcctcattttacatgataaaactgggatatctagctaataactagtagaaaagtttcaaagctctggctccagtggaggttttatttgcataaaatccttccagtgggtccccaccccaataacaaatagttatggcttacctaggtggaatggccatttcattttccttttggagaatgtcgacaatttttttaaacatactgtactgttcaagacttgactttaaataactcaggaatactcctccaagttttagctctattaatacaggtatatatacatagcatccctttccttgtactccagccaggcaaagtaagctaaagttcatagaactcttcctcagattagaaatgtgtccatacaacaatatgaactaaccagtacccccacagctcgtgtctctagctgcatatgtagcagaagatggcctagtcggccatcactgggaagagaggccccttgctcttgcaaactttatatgcctcagtacaggggaacaccagggccaagaagctggagtgagcttcttgtaggggagcagggctggggggagggtatagggaactttcgggatagcatttgaaatgtatataaagaaaatatctaataaaaaatattaaaaaaatgtgtctatgagtcaagataattaggccttactgtctcagacacagtaaacttgcattatcatttgtcttctttggtttgatggagtcaaatatatatttatttcgttgtcatggaagtcatttgagattactattagtcatttgttgtggtatggatatgaagtgtctgcccaaatgggtcatgtgttgaaggcttgtctggtcacagggaagtgatgagattgtcagggtatttacttcctaagtggactaataccttaatgggtcacatgatgttatcactgggaggtagagacaggcaaagttgctctagaaaggctcctcttatccctggcctcctcctgtctttctgcagcttggttgccaaaggtgaacagcttttgccatatccgcagacatattttgattcacctcaagaccaactaatagatccagctgaacttccactggaactttagaaactatgaaccaaagtccctccttggttttcctttggcattttatcacaatgaaaatcaacataccaccttcttttgcttcaagagaaagtaagcctacaatgctccaaatatagagaaatttgggcagagcactgaactgcatatatatagtttattctggccttttgtgaataaagaagtataaatcatattaagtgacttccagtgattttaagtttcaatatcttaacaaaaatacaaaaaaatggatgtagaactattttctattaataaatatatagaaaactgtctaagatagcttgtcatttcattaaaaaatagtttgcaaaacatttaccctcaaagtctaagtgattactgaagcattgttttagcaattctacatattcacaaaaatcacaattaggaagacaaaaaacgttttattttaaaacattgaaaaaaacaaatgtctgttatattggaaatgtcaaatatgaaaactgtgttctatgatacacactcccagatagctaaatactgtaaattgtcctatcatttccgctgttatcaacacttgataaagttggagatataccaaaggtctgctaatcattattcaaagtcatcatccttgggttcaactcttttacacaagtaaaagttctgtccaggatgttcctgacacatgaagcttccaggtgaatttcagaaatattaagaaaagtatcttccttttttgcctgtgaatgtttgcgtattgctgtactgttggcttatatccactacagacactggttctaggccagcccaagggtcttcaagcattgaaggcttaaaataactttccaactcattagacattcttttttctctaccacgccctgatccaaatggtgtagatgtccttggagaaccctttaggaaaaaaatcatcagttaaaaataaaaacatctagtaagagataactggtactttctcctctagtttaatattagtggggaatcacattaaaagttgtcaattgaaacccaatatattcagttgcaaatttctttaatctagtgcttttaaaaattactaaaaccaattgtatatttctcttttagaaatgtctgctatcatcttaaaacctttcagtttctaatgtgataaccaaccctgcagctattaaatacaaataaacccagtacaagcagtggttcactgtattcacttcttggaaacttactttttaacctgataggcttcaaatttctagaacttttatactgcatgaaaattttctattcttattaactccaactcataaggattcatatgggtgagcatattcaattttgcaaaacaaccgagatacaagttgttagctacttcctgtcttgtattcactcatggagaagaggggaagtttcctcaatttcaaattttctatttttccttcaagagaactttgagtaggtataaatatggctcgaaataaaataattgtttcttttaaaaaaagcaaggatgcaaaaacaagggagggacatctgtaggaaaatggcagtagactacagtctagaggtgccatactacacaatagggaatcatttactgtcctccccctaggaatccaggacaattcactgaaataaatgacaaaaaacccaaaaccaaataaaaacctctgggggtgggtgggagaagaaatggaggattaaagaagtttgtatacgaatgtggtatgctggctgagagcagtttctgtggacagagaactagagctccgccacttatggtagtcttagataatttctttacgcctcaggttactcatctgcaaaactgggccaacgtagtatcggaggattaaacaatccacggaaagggaatgtttcgtatcacgtctgccatcacaggaagagttcggcaaacgctagctattgtctttacctgggggtaggtctgctgctgccctggggagtagccgaactgatgctgggaccccgcgggggacctggagtaggagcctgggtagccgcccggggacggagacccgaagcgggcccccgagaagttgccgccgtgccgcggagactggctgctcccgtacggcctagcccggggcccgcagggcggagtgtggtgcggactcccgtacccgtcccgcggggagggcggccgcggccccccgcccagggcaccccggaagttatttccgccaccccaacctcctatccccgggctggggtacggaggagttgggggtcgaaaattcggtcggtgcatatcaggaaacgaagccgcagagctcacacgccgaacgcctcaccggaacctctgcgatcaaccgccagaaggaaactggtattcctctatttatacacccttccggctcccagcggactaccgcaccttagttccggctgcacaaaggttccgatctcaccaagtttctgcaagagggcaggtaaacaggtcactcaatggaagaatggtgggcgtgtctgagaggaggaaagactgtaaaggggaaactaaatctccggccgcagcacgagcacagtcgtcaacggtcttcccggagacccccagtacacgaagacggaagcggaagagaggaaaccgatcatcaggccttattggctgtgagggtgggagaggggcgtgcgggttccgaagagggcggatcagaggggtagggccatccgtcttggaggcttccgggaagcaaggagtgaagcgtcagccggattcgggggcggggccatgagccaagaggcggggccgaagggtgtgaggcgagagactcggttgaacaggatcgtccaagggggcggggccgagtgagactgaggtggaggcctgggcggaagcggagggcgtggtgggcggggaagagtgcgagggcgaccagggggagggtctttgcggagggggcggggctggcggcggggccgggctggctgggggggcggggctgagggggcctaaggtcaaggagggaggtcgcggggcgctctcgctggggttgaggggcgatgctgtggatgctggccagggcggtggcttttcggagacccggccgaggcctggccggcgggagggggctgtggaccggccgcccgcagtcaggtacctactgacactgagcgctcgggctccctgaggggagcgctcgcgcctcgggggctcctgtcgcagggctcatggccatggtcgtgccctgcttctcttttccacccctggcttctaatcccccaaggtttggtaacttaggaaacagcacctcccgccaaaagctgagttttagaaagcagactgctgccttgaaaacttaagcgagcctgtagtaattaatgctggacttgaaccctgcgtttacgttcttgtaaaatggaagttgacgaggttaggaagtagaaacagaaatttaaaggggaaaaaaaaacccacgaaaacataccccaaacttaaaaatcttgtaattataaagaaacgggataattaaaaaatgctatcttctgcataagatacctgtcttagacattcctgtagaagagttttgtggtctttccctaactccttcagatactaaaatcaacttgggattttaggactcatcacattagaccgtggatatgtgagggggttattggtttagatttttgtgtgtgtgagtgtattgtttgcgtgtatgcacatgcaccatttaacgtacctgatgcctttggagatcaaaaaagaatcagatttcctggaactggagaaaattgtggttgtgagctaccttgtgagtgctgggaactgagccaaatcctcttgaaagagcagtaagtgctcttaaccactgagtcatctcttcagcgcctggcctaaggttttcattcatccatagcatctttctgaagcattttggccttcagtctctgacatcttcggtgacataactatagagtatatcctcagctttattctttattaatggagacataaacacaagggcttatgggggggggtgaggttgtttaattttttcatgcccctgctatattcttggataattcagttcgactttttttgttttgcttcattttgttgttttgttctttgtttgtttttttgagacaaggtttcaatacataacccaggctcgaccacatttcttatttctgaagacaaattgtataatcatggagggataatgtcatcatcaggatgtaatgatattttagcgcctgcacactacagcttatctaacatttatattgttctttactggccataatttctgttttatcttttctttgtctagcttagaatctagcatttgagcagtcatacttatgaatgtatatttattcacacatacatgtcagtgagtcaataatctgccttatgaaggaagctgagaagtggggtggtaggcaccaaaagtatgtttattattatttttataactggcagaaaataatgcagaattgggtctcagcttgccctatatgaattaccttctcacttgaattctgcttctagaatggaactgaatccagggcctgtgcatgcagaatgggctctttactgttgggcatcagtgcactcctagtccccggaatctatccacacaatacactaaaaacctgggagaagaagaaatacagggggaatgttgccaggtagattaagccagtgttcttcccagcgcatttgaaagtgtagacaatgattgtcccaaactgaatctttaataattatgtgaaactcaagaccaatgttaatccctttagagacttttttctttcaaatgaaaaatttggcaagaataattaaataatttttttttagactcacctagaagatcagaatttaggcttctaaattttatgtattctttccttagaaatacaatcatttgaaaaatgaaattaaaaaagcataaaaatcttgaacgcaggcaggcatggtgacacatgcttttaatcctagtatttgggaggtagagacaaatggatctttgtaagtgtaaggctagcctcatcttcaaactgagttccaggatggctagagctgtgtaagagagggattctgtctcaaaaacaaaaattactgtgtagcttcttttggatttacagattataagtatactcttagcttgtgaatcatagctatatctaggatattcctaaactttaggctggaatttgcaatctgactggctgatctggtgggcccaagaaccctatattgaaaatttatatagtgactttagtgaaagcatgagaggaaagaaaaatttagttgtgcttcctggagctataaaaattaaagaactgtaacaatggctgtgaatatatagtagcgttctctgggagggaaaagggaatattctatttcagttagcgaatagacatggttcctgcacaaggactgcagcccagtgtagggataaccagcattagaagacaggcgtatgcacactacagtgctctcaaagcagaggctgccagtgcttacgtgtggtctacagttatcatgatgtacatagacatgagcaatgctgcaattttctgtgtccttgagaactctgtggtgataatgtattttggagtgtagagattaaagcaaacgagagcaacaagataaacaagtatgaatgtgagtagggttggcttgtttctataaggttgtaatgtttatttaggttacctaaggggtgtttctatggtgtgtgtgtgtgtgtgtgtgtgtgtgtgtgtgtgtttacagtcagtggatagcaatttcatttctttcatattgccgtatctccaaagcaaacagcaacaaaaatctacttgagagcccaatatataaaagcagaagaataatgtttaaaatagagattggggacccagaattctgctcaccttgtattcttactttgccatcctgcaaagcaactctgagattcctttgaggaattcccagaacatccccagtttaggtaaatggcagtaatagtgcttcatgcattgatactttgtttagttttactgtctgcaagaagtaaatattttcatgtttctgtgttgttagggctttctaaatggaaactgggttaaaggacaagccatggaagttaaacaatgattgattaggtagaagtatgagtttatatttaaagggatataaaccaagaggcttggatgcattcccaggactgcaaactcagcttctgtccccctggaaaggcgatttatatcccatggtgtagggttccccccaaagagtatttaaatgctcccatttatcagaagaaggtagatgctgggttgtcatcctgcacaaactcctagattcataattttgggggccttttcctatagttcaatccctgtaaagaataggtctaactattttatttgtattgtgtttgttaactgtgaggtattaggtgcggggatatggtacatttctcgatgttactcagaactgatatctgctatagaaatctcatgtttagccgggcgtggtggcacacgcctttaatcccagcactcgggaggcagaggcaggtggatttctgagttcgaggctagcctggtctacagagtgagttccaggacagccagggctatacagagaaaccctgtcacaaaaatccaaaaaagaaagaaaaaaaaaagagaaatctcatgtttactttcagaaatgcatatatagattaaaagttaattatagagaaaaattgtttaagagaacatagtaaacaattactatacatggagaatacttagggcataattcctcttgggaaagcataatctttaacttcatacttcctgatggttttcatactgttttccttggagtgctgcctgttagctgtcatgttaaggacagtaggctactaagaagtgaatgaatatgagattaggtcattccttaataggaaggagtgaatctgcttccaacacagtaaatcactttaataatatttccactgacaaagcaaggcagatttaaaggaacttttaaaaaacattgctttgttaaaatttattccccattttttttcttttctgagatttacttattttatgtggttttgcctgcatgtatgtctatgtgagagtgttggatcccctggaactggagttatagacagttgtgatcagccatgtgggtgctgagaattgaatcctggttctgtggaagagcagccagtgctcctaaccactgaaccatctttctcagtctcccttttcatttgattaatctcaagcacgtgattaagcacaagagaaacatgttatacatatttacttctttccagattaatatggttacaccaacagaagtctccagtgaaattaataaaaatcattacagaaatagttctatataaagaggtaaaagttgaaaggtctagacgtgaggtttgaaggaacactgagatggacttgttgagggtaagaagtttaatagaaaggactataaatgccatgaatagatagatatcagcatggctcttgagagagcttagagacagaaaacatgatgggtactctgtaacagaatcaggctcatgaggcaggagtgggtgtctcttcttataggtctctgaggaagtatgggacttcacagtacaagcctgcagccaggctctctggctccctagcaagaggcagagagagaccagagcatattcatggccattaccaacgcttgtaaactcagtttctcgggtgagaacatgtaagtcttaccagagattcacagacagtttcttagggtgagagggatgggctgctgcagcctgggctggagtctgaattagaagtatgactcatgtttcaagaaactaacactagaagattactttaaatgagcagatgacattggaatgtcattggaatctatatctttgtagtctctgttataaaatggtacacatgtgattctatcatttgagtgtcccctccaaaacacaagtaaaagtttaattacaactataatcatgttggcttttaaaagatgtttgggttgaggacttagccctcatgatggattaacatgattctaagttagctattgctagggtggtttgatttaaaagcaagctcacctttgtcatccctgttactattgccctttgtccttttgttttctgccatggggagcagaacacaaagactacatggaggcagtgtgcactcttggaagtcctagctcttaaattatgagaaataaatccccttttaaataaatcacccagtctatgttttctgttatagcagcagagaacaagcaaatacaacctttttgcataaaacgtaaaaattacataagcaagagaaatactgaacttttatccaagaagcaactacttgatgttttaataggaaaaccaaacagttcttctaggaaacagaagaattttaaatgggcaaacaaattataaatggtataatctggctctgcgaaaactacacctttgcattatgtacttctattaaataatggctggtttaaaaggttgttattagatttttttgaaacaggatcttactgtggagccttgggtagcttagagctttccatttgtagtctggtctcagacttacaggtctgcctctgcctcgtcagtgcaggagttaaaggcacacatcaccatgactagctaaaggttaatagctttctacccaaattatataaaccaataaaaagatcaaggtgctttttgaaatatgagaaaacagccaagaggaatttataaaaaagatatgaaaatattccacgtataaactaataacaatagtattcagacagtagcattttaactgtccattttataacaaataaaaacaaccccccccaaattaaaatgttatttaggattatgttagatgattgaagacactatctttggtttttgtttttgtttttttttggggggggtggtcggtttcgagacagggtttctctgtatagccctggctgtcctggaactcactttgtagaccaggctggcctcgaactcagaaatctgcctgcctctgcctcctgagtgctgggattaaaggcatgcaccactacacctggctttcttttttttaacactatgtttgtacactgctggtgcaagcatgtataaatgtaatctttctggtaggtaatttgataatatctattaaaagttctaaggcatttaccatgtgaatatggctaggctacctcagtaccaatctttttccttagaaacaagctccttgctgcttccccatcccccccaaactctaaaggccctgtgaaatgttaatttttacctttaccatttgaagactctggggagatccataaccctttatacacaaagtatctctacacacctctcttgctcttcagagttagccactgaaccaaataacaaagccctctatctcacgtacatcggtcctcacacttcttcaatgcagtccctttcctttgtatattcttctgagctacacatgtgcaatgctatgtgaaataaggacttaatattcttttggatataatatttttgagagtttcatataacatattttaaattatttttgaaattatgatgtccttctattatgcccccttctatctcctccctccaagccctcccatatagccctccttgttttctttcaaatttataacttttttttattaattgttgttacatatttgctccttaactttttccagattgatcttctatctccaacccctcccagctttttttggtcttctttctcttcctccttctcttgtgtgtctctcctcccctctcattttctcctccctttcttcctcttctcctcccatcttcttctgtccttcctttccctacctcttccctcccttcttctccctcctcatcttccctttctcttataaccttgtgaatacaaattgtgctgtgtattagtcagggttctctagagtcacagaacttatggatagtctctatatagtaaaggaatttattgatgacttacagtctgcagtccatcccaacagtggtcaatagcagctgtgaatggaagtccaaggatctagcagttgctcagttccacatggcaagcaggcgaaggagagagaggggagagagggagaggggggagaggggcgagaggggcgagagggagagaggggagagtgaggagagagggagagannnnnnnnnnnnnnnnnnnnagggggagagagggagaggggagagccttccttcttccaatgttcttatatatttccagcagaatgtgtagcccagattaaaggtgtgtgccaccacacctttaattccagatgaccttgaactcagagatctccttgtcttaatcttctggaatccatagtcactatgtctcaagatctccataccaagatccaggtcagaaatttctatctcccagcctccagattagggtcactggtgagccttccaattctacattgtaattcattccagatatagtcaagttgacaaccaggaatagccactacatgctgcctcacactgtggcaatggtgcatagtcaatatagtaggggccacacccttaaaaaaaaacaaaacacctgattctccctcccccagaagccatgaactgtcagcaactcgtcagctaagtatgcatgctctggaggtcttccccacttcatgatagaatgtcttgctcttgtgcaggcacccacatctgctatgaactcttcagtgctttcatgtccagaagatagttttgctctggctttccctgatttctcactcttacagtctttccatggccccacttctgtggtggttcctgagaccgtgcctgtgtgtgtgtgtgtgtgtgtgtgtgtgtgtgtgtacactaaataatgcactccccatcttctctttgtgtgtctctatgtgtgtgtatactaaaaatgccccacttgtgtgttctccactgacactctctttatttgatcagttgtgagtatcatagttccgagagctgcactaatgtatgggcatagacatatggaattagagagtaatgtgatactatgtcgatttagtaaactaatagcagtaggaccacgtcttgagcctgtttaaaggagcttcttgtattctgttggactggaatatcccattatcctacctcacacttttctttctttccttcattctttcctctccctttctaccttttcattctcccttctttcctttcttttttccttgcagcatagaatatttatctatttttaaatttacattaaatccctgacccacctcccccactcctctgctcccagttcctccctctcacctcctctatccccacatcctccnnnnnnnnnnnnnnnnnnnnnnnnnnnnnnnnnnnnnnnnnnnnnnnnnnnnnnnnnnnnnnnnnnnnnnnnnnnnnnnnnnnnnnnnnnnnnnnnnnnnnnnnnnnnnnnnnnnnnnnnnnnnnnnnnnnnnnnnnnnnnnnnnnnnnnnnnnnnnnnnnnnnnnnnnnnnnnnnnnnnnnnnnnnnnnnnnnnnnnnnnnnnnnnnnnnnnnnnnnnnnnnnnnnnnnnnnnnnnnnnnnnnnnnnnnnnnnnnnnnnnnnnnnnnnnnnnnnnnnnnnnnnnnnnnnnnnnnnnnnnnnnnnnnnnnnnnnnnnnnnnnnnnnnnnnnnnnnnnnnnnnnnnnnnnnnnnnnnnnnnnnnnnnnnnnnnnnnnnnnnnnnnnnnnnnnnnnnnnnnnnnnnnnnnnnnnnnnnnnnnnnnnnnnnnnnnnnnnnnnnnnnnnnnnnnnnnnnnnnnnnnnnnnnnnnnnnnnnnnnnnnnnnnnnnnnnnnnnnnnnnnnnnnnnnnnnnnnnnnnnnnnnnnnnnnnnnnnnnnnnnnnnnnnnnnnnnnnnnnnnnnnnnnnnnnnnnnnnnnnnnntgtgtgtgtgtgtgtgtgtgtgtgtgtgtgtgtacaataaataatgcactccccatcttctctttgtgtgtctctatgtgtgtgtatactaaaaatgccccacttgtgtgttctccactgacactctctttatttgatcagttgtgagtatcatagttccgagagctgcactaatgtatgggcatagacatatggaattagagagtaatgtgatactatgtcgatttagtaaactaatagcagtaggaccacgtcttgagcctgtttaaaggagcttcttgtattctgttggactggaatatcccattatcctacctcacacttttctttctttccttcattctttcctctccctttctaccttttcattctcccttctttcctttcttttttccttgcagcatagaatatttatctatttttaaatttacattaaatccctgacccacctcccccactcctctgctcccagttcctccctctcacctcctctatccccacatcctcccttctgttctttctcctctgaaaacaggagtactcccatggatgtcaactaaccttggcatatcaccttatagaaggactaggtgcaacttcacctatgtggctaggcaaggcagcccagttaggagaaagggatccagcggcaggcaacagagtcagatactgaccctctctttttaggagtcccacgtgaagactgagctactcagctgttccatgtgcagagggcctaggtcccttccatgcatgctctctgcttggtggttcagtctctgtgggtcccgaggggcccaggtcagttgattttgtaggaggtttttttttttttttgtggtgtccttgatttctctagccccttcaattcttcctcctcctctttaatgggattccccaagtatataattgtataaatcatatgtatcatttaattttttacaggtattttttttagcaaaattgattttaaaatatgcaaagcaggacaaaaattcctgcaatgtatttatgtgtgtgtgtgtgtgtgtgttgtgtttgtgcatgcatgtcttcatgtatatataagagggtgttgggaacagaggacaacctgaggtgtcattagtcaggagctgtccttgagtttttgggggtttatttatttatttatttatttttggtttttttttttttttttttttgagacaagatctctcaatgccctggcttggagctttccagggaggcttagctggcttatgaatgatccccaaggattttcctccctccacttgcaatctggtgttgggattacaagttcatggtagcacattcagcttaacgtggcttctagttactaaactaaggtcttcatgtttataaagcaaacacttcaccaacttagccctctccccaggccctccacaatgggcacatttatgcctatgtcttagcagatttgtaaaatgatttgttttggtttttgtttgcttctttttgagacagggtctcctatgtatccctggctggacttgacctcacagagatttatctgactcaggatcccaagtgcagaattaaaggtgtgtgccaccacacctggctgtggagcttttactgagagtgaattaaattctgtatacagaaaaagttaatgggtgaatattagtattttaaagttttatagaaactgctaggttgttttcataaaaggttattgattgtcattccaaatgatatgaaagtgttcctttagccataaccttgtcaaccttttaaaagttccaaactggtgaggtaaaataatgttataatattcatctttttgattagagaggaaattgctcaagatgttttttgttacattacagaaaatttttacattaactgttaatttcccgttgtttcttctcactgatctctaagttttattgtagaaatcatttatgtttattcttaagaatgcttttatctgtgactatatcctctatcttctacttttattcccagtatcttttactgtaccacattatctctatctaccaaggtatttattgcaactatgaactattcccttatgactgcttgaatttcaatctttttatctttattttttttctttttctttttgaaaaataaaagctttcctcaaataaaagtgtaaacattttctttcatttttctagcaccttaactatttaaattgtattgatatttagttcttgaatctatgtagaatttaatcaattaataagaacaggcacagtcccttttttcctatgtgtataatcagtttccccaactatatcttcaataatttaacatttctcagtcaactgaaatttcttcattgtgtaatatttaattttcttattatacttgcttccctattcatttatgtattcacttgtctgctttgtttgtttgtttgttttcaagacagggtttcttcatgtagccatggctgtcctggaactcactctgcagaccaggccggcttcaatttcagagagcatcctgcctatgcctcctgagtgctgggattaaagtcctggtttcacttgtctgttattgatatagtatattgtgtgatctcttagcctaattatcctttcctaacctcataattttactgactgtccttgatcatgtattcatcaaaatgaattttaaaataaatgtattaattactccttttgcttctttttctggtagtgagatgtttatgtgtttttggtgtgctttagtgacagggtttccctttgtatcccaggctggaatggaattaactgcagatcaggctgaccttgaactcatggcagtccttctgccctagcctctcaggtgctgagaattcaggcatgagataccatgcctgtgagttccctggagctagaggtacaggctgttgtaagccattggtgtgggtgcttagagctaaactcttgttccccaagtcgaattttaataatacattcagttttatttgtacgctttctaaagcttatctcaggtctactggtagtcatgctctctagggcccattgctcatttagtggtgtatactgaattatgaactcctagggcaaacacagttaggatctttcaagaccattcacatattttatcagcatattaataggtaactttgttttataaatgtttctgtttgaaggcaccatatgtaataatactgttacttcatcagttttaaatccataacaacactaactcatacctgatttaagctcagctaatgtgcattttctccttaaatcatatcatatccttcatgtggtcagcaatattagataccactttgccagtatatttgttttttttttaatcagtgaaatcaacaataaaaagcaaaaaaaaggggggggatatattgccaaatggatactcatttcctgtataacaagaaagatgaagattaccttgtttgatttcagatacgagcgtgtacactgctggttcggttttcttgtgcattatgctgtgtatgtttcaaaatgattgtaagaagatctgttaatttggcgtcacaaataaactttaatgaccagtcaaatctttaataaagtggtctattgtaatattataaatcccttttgatgctacttatgtgtgcaaagctactggttgctaaaatcttcaaagtggcagtatttataaaaatactgcagaggctgcacagcaggagacacttgatgctactttgtactattcgggatacaggtctcactgtgtagtccatctggcctggagcacactgtctagaacccaaggctactcaagcgtctgtgcaggcctgctacagcctgctggttttccagtcttgcaccactgtgtggcatccttgttttgttttctgaagcaggaacttgccttccaatactcttgcttccatcttccaactgctgggattacatgacacttttctgggccctttgatttttttttttcttattttaattcaaagttttatctaagcattagaactttgtggttaattttataataaagttaactttttgttttgttttattttgttgttcgagacagggtttctctgtgtagccctggctgtcctggaactcactctgtagaccaggctgttcttgaactgcctgcctctaactcccaagtgctaggattaaaggtatgcaccacctttaaaattaactattaaaaggctaggtgtggtggcacatgtaattaatcctagcacctgggaggcagagttagctttttatgaatttgaggccagcctggttaacagagacagttctaagccagccagggctacatagtctaactgtctcaaaaccaaagaaacaaaaagtttaaatctgcctttctatccctccgaacttcatgtactttgttttattttttgtttgtttgcttgttttgtatttttgtttttgaaaacctatcgagtcttcttaatgtctgtgtgttcatgggtttaggactatttattatatgtttctctcatatgtggatcctactttcaagtttatagatctgtgtgtttaatttgaagacaggaagctagaaaaggcccatgagaagaggtagagggagcactcatggggtgatgggatagggtacacaggataaaatttatgaaaaacccttctggaaatctactactttgtaaagaaattaaaaaaatacaggtgtagcctcttgtgtcccaaatccctgaagaaactgactttctctttcccagagctgtcaattgcccatagcttcttagctaggagtgggacttcatggctctctccttaatccatactgggttttgtctgtcttgatcttgctcaggtctcacatatgctgtcacaactgctgttagttcatagtctggcaaacacttttcattatagctattcaccccctctggctcttaaaatctgtctactcccttttccaacatcgtccctgagtcctgggaggagggatgtgatgtagatgtcccatttatcactggtccctccccagtctgtttgaccagaagtatgtctctgtgttaattgatatttactgaagaaagaagctttcaagacaaaggttgagagatacaataatctatgagtataacaaaaagctactaggagttagttaatacttgtgagtacaggcttttccacccatacccaaattccctgaagtaactcttgagacttcttagatatgaataaatgcctaggccaatagctttggctcattcccctattagcttgtaacttaattctcccatttaaactagtttaagttgtgccacatggctagctacctctccttcagtttgatgtgactaacaaacagtcttcctcagagttcggggcaagtatttcctggcctgacttttagtaggttctttcctatggcctatagcatatctaggcacaaggtcttggccctgattacagtgccaggtatgggttctgtcttggggaataggccttaaatcctatcagaaagtgtttgattactctaataatatttgtgccagtattgcatcatcagatatgtcttgctgggttggtcattgttttagatttatttatttttattttacatgtttaagtgcctgcatgtatatatgtgtgcttgatgcccaaggggccagatgtgtaagcctcttgagctgtgaatggccaggtcccatctcccagacttctctaaggtccctaaagggcattttcagctgctgagacagacggcaaaactccacctgacagaggaaaaaaagcccaagctacaaaatcttatcaagccctgactttttcccataatcaggtcacagaattccaccaatccctgagcttgcctgcaagatcaggccataaaatcccactaatcctaggccaccctggacctccccctgcccccccaaaaccccaccctatataaaatttgcctcctgctcagttctttgctgcttctctctggatcagaagcagtcactctcctgtgtttattccaataaatctcttctgtgaggtttgttatgcagtgtgacttcttggtactccttgggttttgagtgccaagatacctttctcctcagagctgtaacagaggaggtcataagatctctgaaaacgcgagtaacagacaattgtgaagccacacagggtttagaaactgaacctacaaacttgcagtaatatctaaggctgaacactggaagaggaggcagaaaacttgtaaaagacaggcagtaggtgactctaacaacaaaatgttttctggatacagcggggcaggtacacatatgaactcgctaaagttctgacaacatgcacagggtctgagctatgttgaaccagacagactcataacatgaatgtacaagtatctctagagaggatacagagtcttttgggtatatgcctaggagtggtagagatggatcatacggtggtcctagttttagctttttgagaaacatacacactgatttccgtaatggatgcaccaatttccacccctcaccaacagcccaacagcagagaaaggctctgtgtcctcgcttccacaccagcacttgttgccatttgttttctctttttcttttaatttgttgttgttgttgttgttgttgttgttgttgttgttgttgttgaaacaggggctcaatgtagcactgactggtcttaaactctaatgtagacccggctgactttgaactcacagagatccgtctgcctctgtttcctatgaactaggattaaaggcttgtgtcaccatgcctgaactttcatttattttattgatggtggccaatgtgacttggctgagacagaacctgaaattagtttaatttgtattcacttaaggaacaatgattttaagctgtttaaaatgtttgctagccaggaagacaggacattaagtgtgggatggggttgccatcccacagtcacatctctgactcaaaagtgtacctgtttgaaagaatgacaatgatggaaatagagactgaggaaaagaaggtccagtgacaggccaaagtgggatccagctcaaggggaggtcccaaggcctgacactattactgaggctatggagagcttacaaaaaggaacctagcatgactgccttctgaatgacccaacaagcagctgaaagagtcagatgcagatatttgtacccaaccaatggacagaaagaagcagctgacccctgttgttgaattagggatagctgaaagaaactgaggagaagggcgatcctgtgggaggaccatcagtctcaattaatctggacccatgagatctctcaaacactggaccaccgaacagacagcatatatcagctgatatgaggccacaaacatgcatacagtagaggactgtggggtctgtgttcattcagagatgatgcacctaaccctcaagagactggagttcacagagagcttagaggtcaggtggggtgggggtgggggcatccacatggaaacagggtggagtaggaggaggtgtggcatgtggagcagacaagagggtggatgtgggggagggggggatggaaaaaaaatgtttgctagccacttgtatgtcttttgagaacttagtttagtttcctagcctgcttcttttttgattggattgcttgttcttcatattttctaggtaataacccactggcagatgttttgctgtcaaaagtgtgatcctatttgaacccatttcttcactcaattgacacttccctcttctctgcagaagctttttgatttcatgaagttgcatttgttgattactgacctcatttcttgaacaattggtgaaaggccttacctgtatcttatgtgtactcctctgacagcgtcagagtttcagttcttatgttgtggtccccaattcatttagaaatgttttagagcagggtgatgaataaggatttagtttcattcctctgaatatgaatatccagttctctcagcaggctttgttaatcgtgcttcttttctccagtgtgtaatatggctctctagtataatttgatatcgcctatattgacacctccctcagtgtttctttttgttaaggattgatttggctgtcaggggtctctatgcttccatgctcatttcaagattttaaaaatacttctgtgagaaatgtaattggaatttgaaggggattgcattgactctggatttcttttagttggacagccattttcacagtattgagtcttccagcccatgagcatggaggtatttccatcttctagtgtttttccttgcctagatttatttgaaagcacttagtttttgaggccgttatgaataagattatttcattgaatttttttttcagtttttcattggtgtataggaaggctactgactttttgcgggctaattgtctatcctgccaactttgtgggaagtgtttatcagcttaagacttttctgttctcatgtatagagtcatattacctgcaaatattggcacagggggaaatttcctaaacagaactccaatggcttatgctctaagatcaagaattgataaatgggacctcatgaaattcgaaagcttctgtaaggcaaaggacatagtcaatagaacaaattggcaacctacagactaggaaaaaaatcttcattaaccccacatctgatagagggctaatatccaaaatatatgaagaactcaagaagctaaccaccaaaaaaacccaaaaacaaaaacaaacaaacaaacaaaaaaaccaaccaaccaaccaaccaaacaaacaacccaatcaaaaaatgggatatagaactaaacagagaattcacaacagaggaatcttgaatggctgagaagaatttaaagaaatgttcaaagtccttagtgatcagagaaatgcaaatcaaaatgaccccgagattccaccttacaccaatcataatggctaagatcaaatcctcaggtaacagcacatgttggtgagaatgtggagaaagaggaacacttctccattgctggtgggattgcaaactggtacaaccactctggaaaccaagctggagattcctcagaaaattggaaatagatctacatgaagatccagctataccactcttgggcatatacccaaaagatgccccaccatgccacaggggcatgtgttccactatgttcatagtggccttgtttgtgatagccagaagctggaaacaacccagatgtcccatggcagaagaatggatacagaaaatgtggttcatttaaacaatgttaaactattcagctattaagaaaaaggacctcatgaggtttgcaggcaaattgatagaactataaaatatcatcctgagtgaggtaactcatacttaaaaggacatgcatggtatgtactcactaataagtggatattaggcaaagaaaaaaaatggtacagaatacccaggatacagtccacagaactcaaaaaggataagaagccaaagggcccaagtgaggactcctcaatcccacttgggagggagaagaaagcaattacagaaggggggaggaagggaggatcctgggtgggaaagtggggatcataattaggtggaggaaaaggactgaagccctgagagccagcagaaagaatggaaacaggcaacctctggaggtaggaggtgggggaccctccagactgcaccagagacctgggaagtgagagactctcaggactcaaagggagggaccttagatgaaatgccctacagtggtaagagggaagttatagagcccacttccagcagaaaaacagggcatcaagtgagggatggggttgccatcccacagtcaaaacctctgtcccataattgttcctgtctgaaagaactgcagggacaaaaatggagaagagcctgaggaaaaggaggtccagcaacaggcccaaagtgggatccagctcaaggggaggccccagggccccaggactcctactgaggctatggagtgctcacaaaaagaggcctatcatgactgccctccaaaagactcaacaagcagctgaaagaatcagatgcagatatttacacccaaccaatggacagagctggtaacctctgtggtagtattagggaaaagctgaaagaagctgagaggaggatgaccctgtaggaggaccagcagtctcaacctggacctctgagatctcttagacactggactaccaactaggcagcatacatcagctggtatgaggcacccagcaaatatacagcagaggactgctgggttcagtcagagaaaatgtacctaaccctcaagagactggagacctcagggagtaggggaggtttgggggtgggggtggggtggggacatgctcgtggagctgggtaggggaggaggtatgggatgttcagagggtagactgtgagagggataaaatcttgagaagcagttcccttatagtgtctgctattcttcctgggcagttctcctgtatttgtaattgcagtgctattggatgggaataacatcagtagttagccagaaattatgacaggtgatgttaaaaggttatcttgtcaaaaagggattggatatgatatctcagagtagtttgggtgatggggactgtactggctgtacaacttgaaagaagctagagtcatcagaagggaaggagcctcagttgaggaaatgcctccatgagatctagttgtaacacattttctcaattagtgatcaatgggggagggacctgcctgtggtgggtggtgccatccctggcctggtattcctgggtttggtaagaatgaaggctgaagaaagccatgttaagcaagtcagtaagcagcaccctccatggcttctgcattagctccggcctccagggttatgccctgtttgagttcttgtcctgacttccatcaataatgaacagcaatatggaagagtaaaccaaataaacccttttattttcaacttgctatttggtcatggtgtttcattgcagcagtagaaatcctaagagtccatttttcaggtcaatagacataatatttcaaaggtcagctcacacaaaggtgttgtgttgtgcccacagcccagttcatctgtccatgtgtctcagctctgcttaacacttttttcctgctccattttaagtatcctgaaccatttgtaccctattttgatcctcagcatcctctctaatgctttccttctttgggttttccagtgtctatttttgttgttgttgttatttatctttttgttgaatggtgactcctacaggctttttttttcttttttgagaaaggatacctgaaggtaatgttatttttcctactttcactttcataatgctttgtatcttgattgtatttagacaacagagaagaaatttctgtatcctgaatttttaaaggttttggtccattttagcttctagtggtatcattgataaatctgatattggggggatggaggtatggctcagtggttgagactctttgcagatcttgcaatgaccagagtttagttcccagcacacacattgggcagttcacaaattcctgtaattccatctctagggaatctgatactattttctgactcccgttggtacttgcatcaatgtgggtaccaagtcagcctgttacacacacacacacacacacacctttaagaaatctgaaactgttttgatcagcagtcctttttatatgccatgtttgtctttctaccccgtgaaaggcttcatatcttctttagttagagaaaaaggttcttttttcagatttttctcactgatgtgcttgcatgcatgtgcttttctccatttttatttaacttttccatacaatatattttgaacatgtttttacccttcaccagctcttctcagggctggttattttatttatgtgtacgtgtatacaaaaagatgtgcatgtcctcggtgaatgtttgcaggtcagtggataacttgtgggagttggtttgtttttttttttttttgttttttttgttttttttttttttctactgtgtgtttctggtatggaacacagggtctcagggttggaagtaattgcctttagcagctaagctatgttaccactcctgattgttagttttaactgtcaacttacagttaaaatccataataactttggaagagagtttcagtgagggattttctatacccagttggcctatttaaacattgtgttagctggttgtggtccttgtggctttactaaatgtcggaggataaagaaacatgggtaatatgacacgtactaatgttagtaagtaaaattaggtctgaagaagaaagtaggtaagcaaagacagggataagtattatattgtgtaactctaaaaagaaaaaaacaattgatgtggagggtaacaaactgggaagagaaagctgaaatactgaggattcacagattttagtaactgtgaaaagtgagtataaggctgggagaaaaaggtataaggactaagaggggagtatgtgagaggcagaagaaaagtgtggtagagaatgcacaatcacagaccatatgaagttcaacaagaagaaagactgaagtgggtgcttcagcccttcttacaaacaaaatactcacagaagcaaatatggagataaagtgtagagcagactaaaggaaaggtcacccagagactttcccacctgaggattcattccatatacagttaccaaatccagacactattgtggatgctaagaagtacatgctgaaaggaggctgatatggctgtctcctgagtggccctgccagagcctcacaaatacagaggctgatgttagcagctgaccactggactgagtgtgcggtccctaatcgaggagttagagaagggactgaaggaattgaaggggtttgcagctcataggaagaacaacaatatcaaccaaccagacccccccccccagaactcccaggggcgaagacatcaacaaggagtatacttcagctgcatatgtagcagaggatggccttgtcttgcatcaatggaaagagaggtccttggtctgacagagaggtgggagttggtgggttggtggaggaacaccctcatagaagcagggggagggaggatgtgataaggtgtgtcctggaggaagggaaaccgggaaaggggataacatttgaaatgtaaataatgaaaatatccaataaaaaaaagagagaatgcacaataaaatggtgggtagagaattacacacaacagtctggaaactggatggagcagtaacaaaatcaaaaccatcaatcaggagacatagagacaagagtgagaactgaataaaggaaataagaaactgaaagagtacccggtggagcacatttctggcccagttgtgctgatctggaaagatgaagttatcacacccatctagctgtagcagcatccactcagtgcttggtgtgggaagcctgagtggcagccctcaggctttgctgcctcccttatcttggtctctgtgtttcaggcctgcagaggagagaggttggaaacccattccttatagttcctgcagaaccttgtatatttttttggaatgagacaggccaaacttttctatgttacatatcaaatagaattattgagaaggaaaattatttttgataacagattacttagaatatgaagaactatgtattgttttctttgtaaaaatgtgtaatctctactcttcaatgtaatatgtcttggcagattgtgacagtatgaagcccctggagggtgtgagaattctggatctaacaaggtttgtgttgggttacctgcagattagtgattgaatttcccccttttgtgaaaatttgtgaataaatttttagagtatatggaaatatttacatgtttaggttgaaattttgataaatgaacagaaaagaaattctggcatataacttcatagacaattaatgtagcatttatgaattttctcaatattcatatttgcatataactaactaacctcaaattataactatattgaaattatgttccccctctttttttgttttgttttttccagacagggtttctttgtgtaccagtgactgaactggaacttaccttgtagaccagtttggctttagactcagatctgcctgcctctgccacccaactgctgggattaaaggcgtgtgctgccgctgctctgtataagtttttacttatattttaaatgtatcaatgtgttttgaataatttactatgcttgtttaaagttaacaaaagatgacatttataaatgccccaattattcctcaagttttacttttataaataaggcccttttacatgcagattgttgctttagtttcaattttttccccaggataaaattctagaaataatgttcctgcatcaaaggggttatagttttttaagctcgataaatatggaaattttcaattttaacaagtttgatcattgctagcattatgtgagctttttctgtcaaattgacttaagaaaatagttaatacaagatcttgagatggtcatttatctattgtttctttaacattgtagagtactggcaggaccctttgccacgatgaatttaggagatcttggagcagaagttataaaagttgaaagaccaggtaaatctatccacttctaaaaagtagagtctaataaaaaagtagagggtaataaatgtttttgagaattctgtaaatgatccaggattagcacacccataaattgagtgaggaaatgatggaaatgagttattttttgcatttcctgtctttctgtgtgtctatattaattatcatttatttgtatgtatcaaggactaagactgcagccagttccttctcatgtatggaaagattccgttactgtacataattacagtgctgagagcaacaccatagtgctaggcaaaggtctaagccctccactgattttagtttaatcattacaccaactctgtgtgctgatcaaccagtcctaatgtaagataaatatacaagtgctcagttactatcctggttctccacagctcagaggagaggtcccatgagttagtgagtctgtactccatgactgtgggctgaagggcaaaggtgcagaaaaagaagaacattggatacagagatagagaaggaaaaagaatcaaagttctgtaacaagagatccaaataccccaatctaagccattatttactaataagagaaacatttaatttcataccataaaagtttgattttaaaaatgctaaatttagataagttctttgtcaattatacatccaaaagagggctgatattgaaaatatataaaaaactcaagaaactagacatcagcaaatcgaagaacccaattaaaaatggggtacaaatctaaatagagattcttggcaaaggaatatctaatggttgagaagctaaagaaatgttcaacatccttagtcatcagggaaatgcaaatcaaaggactctgaggttccatcttacccctgtcagaatggctaagatcaaaaccacaaatgatagctcatgctggcaaggatgtagagtaagtggaatactcctccattgctgttgagagtgcaaacattacaaccattctggaaatcaatttggggctttctcagaaaattgggaatagttctacctcaacacttagctataccactcccaggcatatatccaaaagatgctccaccataccacaaggatacttgctcaactatgttcatagcagttttatttgtaagagctataaactggaagcaacctaaatgcacctcaactgaagaatggatacttcatttaggaaatgaagtattactcacctcttaaaagcaatgctatcatgaactttgcaggcaaatgaatggaactagaaaagaatatcctgaatgaggtaacccagacccagaaagacaaacagtatgtactcacaagtgggtattagtcataaatcataggataaccgtgctacaatccacagacgcaaagaacctaagtaacaaggaggacccaagtgggtgttgcttgaatctcacagagaatgggaactggaatagtcatggatgatacagatgaagggagtggactggatggggaggagatgacatgggatggggtggagatgggaacagaagggaccaggtcagggaaggatgcaggtagagtactgggagagacaactggagtgtgggagggcatctctgggacaagctacaaacctagggcaatggaaacttgtagtaattgatgagggtgaccctagctaagattcctaacaatgggagatatggagcctgaactggcatctcctgtaaccaggcaaggcttccaatggagggactgggacactaactcagccaccaaatattcgatctacaatttgtcctgcatacaagatgtatagggataaagatggagcagaaattgagggaaatgactggcacagcttgagacccatgccatgagagggagcccacccctgacactagtagtgatattctgatatccttgcagactggagcttaactgtcatcagagaggcttcactcaggaactgatgcaaacagttgcaaagacccacagccaaacattaagtggtgcttggggaatcctttggaagatgggaaggggggcggaggggcgaggggaaggattgaaggagccagaaggttcaaggataccacaagaaaacctacagaatcaactaacttctgcctattggggctcatagagactaaactgccaatcagagagcatgtataagaaggacctaagccctctgcacatacataacagttgttcagccgggtcttcatgtgggactcccaacagcaggaacagggctgtatctgactctgttgcttgcctttggatatctttcctctaactgggctgccttgcatggtctcagtagaagatgaacctagcgttacttcaacttgatatgccaaggctggtctggtgtatatccatgggagtcctacccttttctggggagaggaggggtgtatgggtgggggagaaggtgaaaggcagggactgggaggaaaggagggaaggaaagctggggttggcatgtaaagtagaaataacaaaaaagctaaatttagataaattctttgtcacttttaaaaaaacctatctatctgcctacctatctgtctgtctgtctatttttccccacataggttatttttttactagtcattttatttgtttacatttcaaatgatatcgcccttcctggttacccatgcacaaaacccctaccctgtagcccctctccacttctctttgcctctatgagggtgctccttcacctactcactcactcccgcctgcctcactgctctagcaactccctaagctatggcatcaaacctccacaggacccaggtcctcccctcttactgatgccagataaggcagtcctctgctacatatgcatctggagctatggattcctccatgtatactctttggttggtggtttagtccctgggagctttgtgtggtccagttagttgatattgctgttcttcctatgggattgcaatcctcttcagctccttcagtcctccccctaacttttccattggggtccctagactcagtctgattgctggctgtgactatctggatctgtattagtcaggtactggcagaaactctcaggagacagccataccaggctcctgacagcaagcacttcttggcatcagcaatagtgtcagggtttgatgtctgcagatggaatggatccctaggtggggcagtctctggatggcctttccttcagactctgttccattttttttttttttgtacctgtctttcctttggacaggaacatttctgggttaacaattttgagatgggtgggtggcctcatccctcaactaggggctgtgcctatctattggaaatggttctatctcctctttgctctgtattttggctaatgtcatccatttgggtcctgggagcctctcacgtccctggcctctgggactttctagtggttacccccagatccccatcccccagtgctacacatttctattcaatttcctgactttctgtgtttctctcctatcttttccaatacctgattctgcccccttttatccctcccccctcatctcttcctcccaggttcctctctccctctaccttctgtgattattttgttccccctactatgtaggattgaagcatccacactttggtcttccttcttaagctccatatgatttgtgagttgtatcgtaggtattctgagcttatgggctaatatccacatattagtgaatacataccatgtgtgttcttttgttactgggttacctcactcaggataatattttctagttccatttatttgcctgaaaatttcatgaagtcattgtttttaatagttgagtagtactccattatataaatgtaccatattatctgtatccattcttctgttgagggacatctgggttctttccagcttctggctattataaataaggctgctatgaacatagtggagcatgtgtctttgttatatgttagagcaccttttggatatatgcccagtagtggtgtgctggatcttcaggtagaactatttccaattttctgaggaaccaccagattgatttccaaaatggttgtctttggaaactaccagctttcagtctcaccaaaagtggaggagtgttcctcttttctccacatctgctgtcacatgagttcttgatcttagtcattctgattggtgtgaggtggaatctcaggctcattttgatttgcatttgcctgatgactaaggatattgaacatttctttaagtgccatttgagattcctcagttgagaattctttctttagctcggtaccccatttttaagaggattatttagttttctggagtctaacttcttaaattctttgtaaatattttgatattaaatctttattggatatacggctgataaagatcttttccaaatctgtgagtttattgtttttttcctattgacagtgtcctttgccttacagaagcgttacaactttatgaggtcccatttattgatttttaatcttagagcatgaaccattggtgttctcttcaggaaatttccccctgtgcccatgtatttgggattcttccccactttgtcttctatcagattcagtgtctctggttttatgtagaggtccttaattcacttgggcttgagctttgtactaggggataagactggatcaatttgcattcttctacatgctgagcaccagttgtgccagcaccatttgttgaaaatgctgtcttttttccactggatggttttagctcctctgtcaaagatcaagtgaccataggtgtgtgggttgatttcctagtcttctgttcttttccgttgatctgtctgcctgtctctatgtggtgtttatcattgttgctttttagcacagcttgcgatcagggatgctgattcccccagttcttttattgttgagaataggtttcgatatcctgttttgtttttgtttttgttattccagatggatttgagaattgttctttctatctcagtgtagaattgaattggaattttgatggggattgtattgactcttgcttttggtaacatggccatttttactatgttaatcctgccaatccatgagcaagggagatctttccatcttctgaggtcttccatttctttcttcagagacttgaagttcttgtcatagagatcttacacttgtttggttagagtcacaccaaggcattttatactatttgtgactattgtgaagggtgttgtttccctaatttctttctcagcccatttatcctttgtgtagagaaagcctactaatttgttagagttaattttctatccagccactttgctgaagttgtttatcaggtttaggagttctctggtagaatttttggggtcgcttatgtatactatcatatcacccacaaatagtgatatcttgacttcctctttcccaatttgtatccctttgatctccttttattgtctaattgctctggctagacccttgaggactatattgaatagatagggggagagtaggcagctttgtcttatccctgattttagtggaattatgtcacatttctctccatttaatttgatattggctgttggtttgctgtatattgcttttactgtgtttaggtgtgggccttgaattactgatctctctaatactatttacttgaaggggtgttgtattttgtcaaatgctttttcagcctctaatgagatgatcacgtgggttttttgatggatttctatatattgaaccatccctgtatccctgagatgaaacctacttgatcacagtgaatgattgttttgttttgttttttaattttaattttaatttttttttagagaatattttttatttacatgtctaatatttttccaggtctccccttcagaaaccccctatttgaccccctctttctcctgcctctatgagagtgctccccaacccacccacccatccactcctgtcttcccaccctagcatttccctacactggggcatcgaacaccctcaggcccaagggcctctcctcagactgatgtccaacaaagtcatcctctgccacacatgcagccagaaacatgggtccctccatgtgtattctttcgttggtggtccagtccacaggagctcgggggtgggagtgaggttctagcctgttgacactgttgcttcctccctagggcttcaaacccctttagcctcatcagtcctttctccaactcctccatctggggcaccccacccctgctcatcttatcttcatgagacggaattctaggtcttaatcttgcttttcaggtgtattgggtgggggggggtgcggtatccagggcttgctgtggtgggagaactgggttctgatgttgctaagtagcattggtttctgttgcttatgttcttgcatttgcctcttgtcatcttgttatgtctggtgttaattggtcttgctatttctggctggaacctgttcctcctgcaagcccatgatcctgtatgtgtcagaattcctgggggtcaaactatttctgggtgtgggtggggcagcctggaacatggcctccacaactggacgcaggtacaaactggaaggaaccctctggctgggcggggtttcctgggttccctgagttctggagggtcccagttaggctaagtaatgaggcagggattggggccttacctgtgatcctgaatgtgtcaaaactcctgagggtcaagccgggagtggtggcacacacctttaatcccagcactcgggaggcagaggcaggcgaatttctgagttcgaggccagcctggtctacagagtgagttccaggacagccagagctacacaaagaaaccctgtctcgaaaaaccaaaaccaaaaccaaacaaaaacaaaaacaaaaacaaacaaacaaaaaacctcctcctgagggtcaagctgcctcttggtgtgggctgagtgggtggggatacagagcacaggctcctctccctggtgcaggtgcaaaccgcaaggaatgtgtatctctggttgggcggggttcctgcatcccctgggttctgcgggtcccagttaggccaggtattggggtggggcttggggccttacctgttatcctagatcacagaccctagacctagaactcctgggtgtcagacgtctctcggtcctatctatctatttaattatagcatctctttacgtaacccatctggtctggagtctcaaagtctcaaacacactctaggatgtgatatctttttagttcatccttttcttctttgcctatcaataaacatcctctgtgtacacatttctcattttatttggtgccttcttagcattttggcaacttgttagtttatgctattatggattaaatgctcatgaaagtgccaatgtagcatgccccttttctccaacaagcacttgggcatagtacctattattcttgttatctaactatactttaacttgttcattttgaagttttcaaaaattattgatattctttgtggtggtgcacagctgtaaccccagcactatggaagtgggagtagaaggatcattagttgaaggtcattatttatcacccaatgagttctagtccagcgtgtgctaaatgagaatgttcctcaaaaatgatgaaatcacattatcatttgctttcaaagatttgattcttaaagggtggagacataattcgcaaatcatcgagaatggtctagtatagtaccgtagtacagattcataagactcaaaaaagacaatataatataataatatgtccttaatactttacagtaaatgataaaccctttaatgcagaatacttgggagattcaatttatttctaaatagattttcacaagagcccaaagtaattagcaaaagattctcatagcaccaaggtgaatattaccattcatctgagccttgtcagtttccacgggcagaacctctcaggccctgctttccagaggcaatgcctcacctactcagggttatgtacccagtaagtgacatgtgccaccttttgtctgttgcttatgctggggaattctgagcaccccacctcccacagtccaggttcgttaaagttctagctttctttttgcaatcctattcctcttgtttttttttttttttagggtctgagggaaggagggacacacacacacacacacacacacacacacacactcgagtacattttcttgacatcatacctgatatcgagttaacatttgtatttgtattgatctctggattctctgttcctacctagtaggtactgagaataagggcagactgctacacccacctgaattttatattttttgctatcatggggttctggggatttgaactacggtaaaaaaccaacaaacatattacttactgatgggccatttccccagcctctgtttggcttattagatttttattacagaaatattttatagattattagttattattgtatgctcaaccctttaggcaaatttatatatgctcacattattattctgatttaaataatatataacatctcttttgtttactttatagttttatttcccattcagtggcaagaaattatcaaggaactgactaacatgcttgccaaaaactgaccccctccaagtttgctagttatcaattttaaagagtactagcaaaatatttcctttggattttgaccttcaacactgtaagttagtgaaagcacatagggagtgatttggcagttggtattagaaagtggaggtctggtaagttgtattaaggtacagaaaactcccagcggatgaggatccactaggatgagttgaccttcttcaggtacctgggagtgtgcacagaagtgagcctgtcggtttgcaattaatagctcatattatcatttacaggagctggtgatgacacacgatcttggggacctccttttgtgaacactgaaagtacatattttcttagtgttaatcgaaataaaaaagtaagactatttcctgtttttgctttattcgtgtaattctatggcagttacaacacttttgctatcatggcttgctttttgatatgtaactaatatttcaagtttcatgatcacatgtaagcaataaaattttttactagtcctcctctactaaataacttaagaaattatgagaatttgtaatggaaatattctgtgaaaaacaaataatttggttccttacatttattctcttacgttggtattatacagtattgctactgaaaagtatgtactatgtatgcttcttggtgtcagataaacattttgattgtaactaaagtcaataatgattacctatttattcataaaggtactaagcttgccatataatgagaatttgtgttatatgaatggctctgttgttgaactgacagtaatgatgaaaacgtttatgaacacagtctaatgttgacattttgatttttagagtatagctgttaatatcaaggatccaagaggagtgagaatcgtcaaagaggtacagtatgtgaaaaggctccttagtgtttaggttcttatgagggaattggttacctgcgaaagggtctaaaacattgctttattgccaatctgtaagtggtggctaaaaatccaatttagtaatttgagttgtctttgttttgggtggcttgtttctcactagtgttttggattcaaaatccaattaaaatataattatgtccccccacctccttctttctacctttcccatgtcccttccctactttgtctcaaattcatggtctctctgttttttaaatcactacttatatgcacgtacatatgtcagtaaatataaaaggcaacccactggatccaggaagtatggcttgtgtgtgtatttgagttgacattgtttaagcaagcatagtgctctcaatagtttcttataggttgcatgtaattaaaatcatagggttatagattgagtttttaaaaagatttatttattatatattttatgcatatgagtacaccaccattgctctcttcagagacaccagaagacgtcatcagatcccattacagatggttgtgagccaccatgtggttgctgggaattgaacttaggacctctggaagagtagttggtgctcttaaccgctgagccatctctccagcctgattgagttcttttgacatcagattctagtcttcagtattatacttatagtttcctctcaaagcataactttttgtataaatgaagtattagaatcttaatttttgggccagtgaaatgggtgaagcagtaaaggtgccaagaggatctgagttcaatcgtaagacccacattatggaaagaaagagccaattcccttatattgtaccctgacttccacatgcatgtgtgccatgagaacgaccatacacattcaaataagtaaatagatgaacaaacaaataaatagtttttgttttagtttgagttttcaagacaggctttctctgtatagccctgcctgtcctggaactcattctccagacgaggcaggccttgaactcagagataccctgtgtcagcttcctgtgtgctggtattaaagttgtgcgccatttgtgaataaaacataataagtacataaatgtgattttgtttgtttgtatttaaataaaaaagaatattgccatggaaggtgattgagtggcctcaaatataaatgacacacataagatcatgtagctcatgttgatttggcataaagctaacacatttgtagtgaactgcaacaagttattgaacaaactgtttgtgggctatattgatgtgataatgaacttttgatcacaacaacaaaacttcagccaatcttaggctaccagttggtcaggtggttgttttttgcatgtgatttcttcctgttgtttataagtgttgcctatccacattgctctggtcttgcgcacgccggactggccagcagtaacaacgctgcaacaggatccttctgcacatgtttattgggagagcttgattgcagaggcgaagagaccccgagcccagaactggtgctgcttatataggcctaggagaggcgtgtctcacacccggattggttatgcactatgcctcatttgcatgttcctcatctgattggctaccctctctcagtacctcacagaacctcattaacatacctcatttgcatgtctcacatctgattggttatattctcagtacctcattaacgtgcccgggccaggcagtgacttggcaaaaagctttactgcatatgtacacattggttgtttgtccaaacttatgcgtggtagccagcagtagccagcgccactctgcaacagcacatgtggcttcccacactatggaagccctttggatttctcccagttctcaacactgcctaatgcattcattttagaactaaattttgttaaatttaatattcactttaattaagcttttggtttttcttttaacataagtcagggtgaaatccaatatttgaacatggggtcacatgttttagagaaaccaagtgttcactggcatacttagcatgttcttttcccaaggtagcattgcatagtgggtaagagtatgcatcttgacatgagatttgaactctgcctctttttctttcaagctatgtaaatttaggtagattatttttttatgcctcagtgttctcagtagtaagatcttaactgtatcctcttcccatggtgcttagaattttggaacacttctaaacaacaagaagaaatcacataacaaccacctgaccaactggtagcctaagattggccgagattttgttgttgtgatcaaaagttcctttggattaaatgcttaaaagagctcttgctggacagcacccactcattatgatttgttatttcctgatgcaaatgtggttggctgcatcatgtgagataatcatatttgtcatcattaagcttttcaactcatttttatggatttgtatccatttggttagggaaccaagtttcgagttttaattaaaaaatttttttttagtcaaattactctttttaaaaaagaatcaacttcacctatattgttataaattattttctttttttctttttggtttttcgagacaaggtttccctgtgtagccctggatgtcctggaactgactctgtagaccaggctggccttgaactcagaaatctgcctgcctctgcctcccaagtgctgggattaaaggcatgcaccaccacgcccagcactgttataaaattttaagagcctcttctgtgattcacctgtagaatcttgccaaagaacccaaacagcagtcttctgtcattaacacatcaaatacagttgagcctactagattttgtgatccaagtggcacgatagcacatatagcatactgaacctggtgaaaagctttccctggtctagactctgttaaaaactagcaacttccagctcatttgctataaggtctggagtaacacaataaaatgaggaatgtattttctctagaataggcccactaagccctgtgctttcttggtggtagaaggggcagggtgcaagtacataatcttcaccttagaaaggatatctcagtcttaaaccattgaaaccctagacattttactgagatagaaagctcttgagttttgatgcatttatttgtcatcttctcatggactctttaccaaagagtccagaatggttgatattttctgttcactttatcaaataacatgatgccatgaatgtaatggagcagtataacaacctgtagccaaggcaagcaatatgacataaggatacataatggattcttgaagtagaagtgttaaggtattctactagcattgccaggtataaacattacttctgggagtctttatggacagaatgatgatagaagtatctgtacgacctgcattcctggtaccaggaggtaggtaactctgttcaggcaaggaaaccactccttgataactgtagtgacatgtgtaataagtcctttatttctggctttaagtgaaatgtaaagtctttgtgtctggctttgagtgaagtatttcagcaaagcctttgccatgtttgacttaatcagtagaggcagagaacttgttttgagacagtttgaaccttgaagaaatgttgtctctctggaaagtctgcacttatacagcttatagctgtgtaaaccttggtcctagaacactcctggcaaacttgggagttcttacttctgattatggctagccgtggtcaatagggactgagaattgtctgagttttcttctctctaggcagcaagggcaagcaagatactttgatagttaaaaccattaccagcctcaattaaccttgtgctatgactgagtagaaataactagactgagctagctgagctgagggtcagtcttttccaagatgattaaccctctgttcctttggaaaatgaaggcttagcatcttggtgagcccctctactgcatctcctataaccaacatacatcaatatgtagcagctgattggagtcagtacttgattaaatttgcaataatcaattgccattctccctgatatatccatcttctgcacaggcctaatagcagaggtagagggatatgtagtggaaactaccacccttgcctcttttaggaccttaacggtggagtaatcattttcagggatgtgaaatgttttgggttcactaatttttctgaggcaggttaatgactttcatttggcctttctaatcataatgtctctcattccacagatcagggaatgtgaagattcaacaaacttctaagtgtatctatcccagttatatattcgggaatgggaaaatatactcaggggagttcagaaacccactggacctgctgtaattcagactttggttataacttcattgatcatctgacctttataaagtcccactttaaccggagggctacaacagtgttgggggtctccaaggactaattaagatctagtgtctagtaggccctgaatggcctgattatttaattttctccagtgtatggttacccaagcagaagtctctccttcaggggaagaatgggagagtcattagtactttttttttttttttttttttttaaagttctaagccagatccttcatcaagtagaaccagcctctagtttgtttgagttttgtctctaaactgattcatgtctggaatttgcttgaagggccgtctttgtttctgtgatcctgggtagtgttggttcttttgcttaggatgttttctgcttttacaaattgaacaagaatgtaggcttcttttctacttcacttttaggaataccatgggtattaacaattaattagctagtgccaaagatctatgcaaatgaggccattatgaacactactttgcttgtagtgctcactacactaaaaatgttaaccttgcctttgttgactcagggctgccatttggcctttgctatttgagggtctaagtagccccattccatctaagttatgcagttgagcaactgaagatccctgtgtgaggttgggcattaagagacgagcagtcctaaagtgcttcactttgctggtgttcctcttacgccattagggagggcataccttctggaccctctagaggtacaagcttctgttctctatctaatacttggataggttctattttcatcttccttcttgatttctttccttcttttaattggatatcttatttatttacatttcaagtgttaacctctttcctggtttcccctccgcaaaccccttatcccatctcccttacccctgcttctatgagggtgctccccccacccacccacctcaccatcctggcattcctctacactggggcatcgatccttcacaggaccaagggcctctcctcccattgatggcagacaccttcttgatttcttgtgttgtttattttacattagtttgactatgcactagagtttcttttgctgttgatctgtagcagcaactctcaacttgtggcccatggcccctttggaggtcaaatattagatatcctgcatattagatatttacattgtgatttgtaatagtatcaaaactacagttataagtagaaatgaaataattttatggctgggggtcaccataacatgacgaactgcattaaagggtcactacattaggtaggttgagaaccactcatctgtagtcttatttcattgtattagatagactacaactagttattttacagtattagtaaagattttctttgtgttttaacatatgtcctattttagagaaaattcctttggctgctgaggaaaacaaaatgtgtactctgtaatatttggatggaatattctatagatatctgttacacaacttggtgcatggcaaattagacagggttctctacaggaacagaactcttagaatgaatcaatcacctacctgtttatctatctatctatctatctatctatctatctatccatccatcatctatctatctatctatctatctatctatctatctatctatccatcatctatctattcagctatcatttacctgtcatctatctgtatttatctatcatatctatcatctatatctacctatcttataccatatctatttatatttatgtatcttatcagatcatattatatctatctatatctgtcatctttgtcttatatcttatctatcatctactatatgaattaacatttatcatatatcatatcatttcatatctgtctatctatctatctatctatctatctatctatctatctatctaggatctatctatctatctatctatctatctatctatctatctattggagtatcttagaggctgtggtactgatagtctaatagtggctgtcttctgacagtctaataattcagtcagtattcaaggctcaaagtcttagctgatattagtaggctctgatactagtgaaggaatgaacttccagcaagaatgaggcaaaacccaaaagcttccttcttccatatccttttccaaagcagccaatagaagatttggctgagatttagggcaagtcttctgaactgaaataatttggatttaaggtgagcctttccacctcaaaggatccagtcaagaaaaatcctttaaggtatgcccagctgcttgggttttatgacaggatgttctgtctagttggtgagagtagggtgttagtctgtgactttacatccactaatagtagtttaataaaattgggttaacctttggatgtatatctttagaattgcaatatcctcttgatggagtggtttgttgatcagtatgaagcaacattctttatcttttcctagttgctatcctaatagctttgtcagatatcataacagtgacacccactcatttcctgggtccagttacttggaatacctttttctgtccttccagcctaaggaaatgagtgtctattgttatgcagtacattccttagaggcaacaaatagctgatatctgcttttttattcaatttactagtccgtgttttttaattgataaattaagaccgctaatattcatagttgctgaaagctatgtgttgtttactgccatttttgctcattgttttcagtctttgtttttatgttctcttcctctcttgtttagctattaccctagcattgctgattatttcctatggcctttactttcccttcatcttgaagagctccatctcctgtagagttggcttagtggtataaatttctatagtctaacttcattacaggaaagctcttatttttccttcatttatggcagagagagtttctgggtatagtcgtttgggtcagtttttttttttttttttaaatttcagtagcaaaacaactaacattccaagacccctgactttaaattttcagttgaccaatttagtattattctcatgagcctgcctttatttgtgactcagtccatctgtgttactgcttttagttactccctttgttctgtgtgttcagtgttttgattatattatgattatgaatttctttgctcttgtctgcctgatgttttactgcctattgtatatctggattgacatttcttttgctaaagagatgggagattgggagaaatttattatggttcttaatttttcctttttccttagaactagagtcttctttttctatgcatggattcgatcttttgtgttgtgtatgccttggaatacccctcacacttttttataattttaccttcatccttgttagggtgtcctccacctcgtgttcaagctcatatagcctgtcctttctaaatgcattctattgctgaggctttccatgatttttttcttttgtatttgatctactattttttaatttccagtgatctaggcttgcttttcttcaggatttttatcttttccttggattcctcttccacaccctgtatcactttccttacttcttccatctttttatgccattgaacatacctataattatttttttctcggttagtgatttcatctaattctctcttagttggtcatattatacagtgctaagacactaatttttggtggagttataatgtcctgggttttgtgtttcttaggttactgggttgggatttctttgttttggtttattacttttcagctaaagttgaagcatttgcaatgttctgaaggaagatgaaattttgtaacttgtttaggagcccacggccgggatctgggactgagaacaaagcagaacagcccccaggcaggccaaggcagggctgttgttaaggcattcgtaagaacatcttggccataaagatgaaaaggtattcaaggacaaatggggctacattatctaaagtccacaccatctggccggaacctcctgtctgtccattaccccttggcgccaagtaaaatcacataaatcaactggttgttagataagtcccaagcccaccggaacaaagctctgatgccccctttttgctgacatgtaatctttctgttaatgaatcaatcctgtgccttttgtcaaaattccttgtactcccaaccttttgcttctttaaaagcccctagcctccgagtctcgtggtcgactcccctgcctcctgcgtgaggtacgcgtcggcccagagatctgccaaataaacctcatgcgtcttgcaacaagagaggatttttgtgttcgtgggtgcttcctgttcctggattagagcggggtccctaaatttggggtcctacagttctggtgggacttggacatggtagagttgcatgtgtggttcagaaaataatttctcagtccaggagctcaaggtgcctagtgtaaattctgtgtttttccttgaataggtattaactggtgccgcagacccattttggttcctgtctgtatagaaggagtctctagttgcaggtggacaaggagttggcgaatgaatgacaaacagaagcaacacaagagattgtgtaaaatctgaatgtagtttgtcaagtcgagcatcaaacttttcatacagaagaataataagaaaccaggtgaaatacatccactgagttatagtgacacgaaacataaggaatgtatacatcaaaagatggcagggaccaggctgctgctgtttaccactaagaagggagccaggtgtaatgctagtctattgttaagcccaccaccaggagttctagtgaagaaacctgactcagggggattccctaactctttcatggtaaacccacctattcgctaggccagtcccttgtctgggtaagactggctattgtcccaagtaaacactctgcagactagccctgagctattctagttctgttctttgtaatgcctaattagtttcacgttctctactagaagtaaatttgaatgttactgaatagataacattcttactggtttcctactgaattccaatctctttggcttcaagcattttttaagacgttggaacactggtggaggcttacttatgtcagaattcaatctttaaaggcacttataataaaataatactaaaagagagcatgtggatccatacaccagactattgcagggatagggtatgagggttatgagaatgcctggttccaggaggttgagtttccttgaaactccctgcctcatgagtgcttccaggcttctcagcctgccaagcagacttcactggagtgtgcatagcaaactgggagagttataagagatgttggatatgaccacattcaattgtcatactagccagttcacaacattgactcctttgatttcaatactgttggagataaataaccccaggcagtataggagtatacttccaatttagtaataagatcaggagtagaaaggaagtggagtgagtaaggttaaatgttagattcacctggaaaagaaaaaaaggatgtggtaaagtcgtcaggaggggaaaactgggacaatgttaagatccacaaaattttaacatttttaaagctgtggaaggttacaattaagatgtataaacaaaggcgggtaaggttgaggaaaagaagaaaagatgcaagaataagttggggaggcacatataagatgttgctgcataatccagtaaagagtaccttctagtaaccaggatgcataaacacaaataatagttctaagtcataatagcagtaaaccagcaaaccagccaaccaaccaaccaaccagccagccagccaaccaatcaaccaacacactgaggcatatatacgacagtagaaattaaataaaagaatgaataaataaacaaataagcaaataaaaataaaaataaaatactgatgaggtgaattgttggcacaggtatccaagttgaaaagctgtagtttcaaatcccactgtctctagctgaatccatgcaatactgtgtatgataatgagagtggaagccatcagtctctgcggcctcaggattttttgggctctcttgcatgtggaaatcagaatgtaaattcttttttgatagttctctcagaagagtctttccttgtgtctcctgtgccacttaaaaccctagttcttaggctgtgtgtggtggtaatgccttttaccccatcatctaggaggcagaggcaggcagatctctgagattgaggcctgtctggtttgtatttagagagttccaggccacagagtatagcattatgaagccctgcctcaaaaaccaaaccaaaccaaaccaaagcccaatccatggtaaccaccacttcaactatcactcccctcaaaatcatagtctttgttccactgtagatgttgtctctcaacagtttccacatcactgaatcctgtatgttttctatttccctagtttagaggtagtctgatggcaatgtatactctggtgacagtggctctgagtttccaaattgttcagttcacagaaagtctggggtcaccaaactggaggctcagcaagagtctttgttgttttgttttaaattaaaaaattttgatttcatccccattctcaggctcttactttctttctggcttctctgaaatgttcccagagccttggtaatgttggaattggtgtctcatttagagctgaacaccaagtctttaatccttagcactgcgattagttacacacctctccattgactgctatccagtgcaaatgaagcatctttgatgaagattgagagcagtctaggtctatggatataaacaaatatctataagacagtttcacaaaatgagcacttagcaaaataacaatatcaggttctacaatggtcatttaaaatttattcatttagttttaatttttaaacattttgatacaggctctttttaaaaatggtacctgtaagtgctttgatgagagttttctggtgctgctcttcactattctagtcaccatatgtgcctatgctttggcttcccctgtttttctcctctccatagcatcatagcatgctattgaacatatggtgaagatttcctgtgtcccctgctgtctgctgttggtcttcctgctttctggctgtgtacttactcaaaccaaaccagttccccaagataaactggactatgtttctttgtaaactttttctttcagttgatattcagtttagttttttctaaattgttcttcattattgcttgattgcattttcaacaaatggtgctggcacaactaccggttatcatgtagaagattgagaattgatccattcttatctccttgtacaaaactccacataaaccagagacactgaaatttatagaggagaaagtggggaaaaccctcgaagatatgggcacaggggaaaaattcctaaagagaacagcaatggcctgtgctgtaagatcaagaatcgacaaatgggaccccatagccactcttataaagggcaacttttaattgggacttgcttgcagcttcagaggttcagtccattattattgtggtgggaagcatagcagcatctaggcaggtgtggtgctggagaagctcagagttttatctcttattccgaaggcaaacaggagaagactgaatccccaggcagctaaaaggaggacctcaaagaccacccccacagtgatacactttatcctacaaggtcacgcctattctaacaaggccacacctcttaacagtgacaatccctgggaaaagcatattcaaactaccacatatcccagttgaggtaacctagacccagaaagacaaatgaggtatgtattcagttataagtggatattgtctattaagtaaatgataagctaagatccacagacccaggaaggttaggtaaagagcagagctctagagaggattcatggttgtccccgggaaatggaaataagaaaaatactatgggtagactaaggacagatgggaacaaggtggaggagttgggggtgggggttacatggggatggtaagggatggaggaggagaattcagggagagacagctagaattagaggttgtttgggggctggtgtggaaatttagtgcattgaaacttcctggaatatatgagagtgatcctagtgaggatatagactctgaactgaataattttagtagtcagtcaaagcttctaagtgatgggactgtgttgcattcagttgagttgttggccaagagtgtccatggagatccctgtggtggtttgaatatccttgtcctagggagtggcactattaggaatggccttgttgaagtaggtgtggccttgttggatgaagtgtgtcactgtgggggtggtcttcgagaccctcctcttagctgcctgaggagttggtcttctgtttgccttcagaacaagatgcagaactttcagttccttctgtgccattccttcctagaagctgccatgttcccactttgatgataatggactgaaactctgaatctataagccagccccaattaaatgttgtcatttataagagttgctgtggttatactgtctcttcacggcaatagaaaccctaactaagacaatcactaaacaactcaggataatacttggagagagcaaaaatctgacagtggaaccccattgctgaggacaacatttacacagtttgttgaatgtggagaggtctagcttgtgcctgcatggagacttatccctatgattttattctgcaggctatggaaagagaatcctgatgccaactcagttacgaaactcttgacctatattatctgtcctgcttgaaagatgtgctggggcaatggtagcacagaacttgtggaagtggccaaccaatgtctggtttaacttaaggcccatgccaggagagggatcccatgccctgtaatgtctgtatggccagaaaccagagacatgttagcttagagacctagggtaaaaccaaataggaccggtaaaaacaatcagtgaaatgatttctaatgatattctactatactcataaattagtgccttttccagttatcagagaggcttttccagcagcagatgggaataggtttagagacccacagtcagacattatgtagaaagaggaaatctaagttggaagtttcctttgggtccctccccttggatttcatagaaacccattgaagagtgggactgtaggagtcagaggggatggaggaactaagccccccacccctatcctgctgtcccaactattctgggctctacttcatcctttcttttccaatgtacagcacctggacacccgaagggagaaagtagaatgcagaaccacaagggagtgagtgtgtctctgactctttttcctgttcttgggacagttttacattgggttgtcttgtctagccttaatttgagggctttttgctttgttttattgcatcttgtttcattctgtttggttgttgtgtcttggaggcatgctcttttctgaaggaaaagagaaggggagtggatctgaggaagaaaagatgtgtggaggagctgggaggatttgagcaagggaaaactgttgattaggatatattgtgtatgtcaggatgtatataacagaaaaaaaatcccttcattaaaaacatggccaaacagttttgattattccatttaataattgtgtgtttaaatgtatgtgggtatgttagtgccacagaacatattagatattagagaatcacttgtgagagtcagttatcttcttcttccatgtaggctttgggtatcaaactcaagttgttggggttttttgggattcctccatagatttaaaaaaaataatgcttattgtctattattttgtgtgtactggtttcttgcctgcctgtttgttcatccaccatatatatgagctgcctgtagaagccagaaaaagtcttgaattccgctgctactgtaactttcatgtggatgctggcaactgaacttgggtcttctagaagtgcagcagactgctcttaatcactgactcatccctttgctcctcccataaggttttaaatagaaaattatttaatgacatttacataattaagacactatgtcaattattatatagtacaaatgcagtagacatcaatataactgcctatatatacttgatatagtattttttctatagtatctgcaggaatgatttttaagtactagatcaacaaaatttgtataataaactaagatgtagctaaagtgtctattatatttaatagcaacatttcctttccattctcctataaaatatttgttagatattttaatatcatcaacattaataaatgctcttatatcaaggctcatctagtgtggtattagtatttgttgtcaactcaatgcaaccaagagtcatctcggaagagagaacctcaattgaggaattgcctagatcagatcggcccgttgccatgtctatgagaagttgtcttcacaattgatgtgagagggccctttccagtgtgagtggtaccatccctaggcatgtggttctgggctgtataaaaacgttatctgggcatgagccagagagtaagtcagtaaccatcttaagggttctttggaaagtcagttgtgttggatgatattttgataaagcagacatgtgaaggcatttttagctcaactggacataggtaaaaggatgtttgaaaggatgttgcactaaggcagtctcaggaagaaatgtttcactgaagcagacacaggagaaagaatgctttgctaatgacatacatgtattggtctaccttacagtgtatagttgagttccaattgttgggactccatagaaagaaacactccaaaaaactggtggtgtgctgtggtttcttgctgcttctgcagactaaggccaattggcagagtgacatcagctgagacagactcacatgctgaggcaatacatgtgctgaggcaagacccctggaggacaagtgatgtttggaggagtataaatagaactcaatcaactgtgagatgggcttgctggtagagctagctgtgcattgctcgttggtttcgagtctctgctgatcttcatttcatcgagagaaggcacagccgaggacgtctggtactcctggttgcctgaatcccttctgctgactcatgccatttgaccagggcctagctgctcctgctaagtcgtgtcaccactgctactaaaacaacattactgaactggactgctggtatatccaggaaatgtttgtgagtggattgagctgcagctgctgacccgtgaactgaactgctggtttcctgacaatgcagatgggatttttttccaaagaatcatttctaaataggtttacttcccctgtatcctttcttttccactacctttggtgggtggtgggatagaagggaggttaaaatgtttaagaaccatcattaaaagaagactttgaaaaattcaagttacagcatctttcctccatggtttctgcttgatttcctgctctacttcccttaatgatatgatagattatacctggaagtgtaatccaaagaaacaatttcctccactaggttgattttgctcagagtatttaatcatagcattagaataatatacttggagtatgctgtatcactcgcccatacgagaagtttatcaacttaacttgggatttggaaaggatacttttatagtgtgatatttcagttgcacacctgcatcttctctgtctttatttgttattatttgaatatattttgaatgtggttccaaagggtcctgttttggaggcttagtcctcagtacatgaatactgggagagattggaacatgatagaggtagaatatagtggaaataaaagatggaaggtggttgggacacaggaatatctgtcctcaaaagaaagaaaggcagttctcatggaactgcagtttttatttgagtaatgaagtcctattttccatcttcctatcctacaatttattcttttttttactagttattttctttatttacatttcaaatgttacccccattcctagtttcccctctgaaaatcccctatctcctcccacctccccctgttcccaacccacccactcctattcctggctctggcattccactatactggggcatagaaccttcacaggacgtaaggcctctcctcccattgatgaccgactaggccatcctctgctacatatgcagctggagctataagttccaccacgtgttttctttgattggtcctttcttttctttgatccttcttgagtaaacttcatacattgtgacgcttgttattcatgaaatcctcactcatttcagctgatgcttatgtttcaccttcagacctctaaagagtaaggaaaataagtccctgctctggagtagtgtctccagagaggtcacgtacttgaatggtgcttttatttctagagcttcaaaggatgacagggtctctacttgagatgcttgctaagatgcatcccttcagttgttgaaaatcagaacaaaatacagtttaacacagaattttatatatttacgttttattttattcttttgagcctatatttagacagaccatgtttagtaaatgtttcttatatttgcagggtacaaaatctatttaatagtatacatttacaaaacattataaccatggttttcttgacagtagcagttcaagtaattgatcagatcttttatgtatacataaacatactttatttatcctgaaatttttttctggattcttccgatgtgagaattgaaattggagttaaaattctattatgtgggaagagttgttaaaggtttggcggtacctcaaaaaaaatctgcttaatttttacctctttcttcagcttgcagccatttgtgatgtgtttgtggaaaactatgttcctgggaaactttctgagatgggcctaggatatgaagatatagataagattgctcctcacatcatctactgctccatcacaggtatttcaaccctgaactgtccttctataagaaacccatcacttcttcccaagcctcagagactgctgaacagaattattaaggacctttgacctaaattgaacagtttcatagatttattggatatttgtgtttcttttctgaattggcaaatttacatttatacctaactatagtaaaggtcaaagggatttttaggccttcagttattattgaaatatctcctcccccaattctcaaattctgtaggttttttttccccccagagttttacatagtccatgctggccctgaaacatctttgctgtagttgaagatgatcttgaattcatgatccacgtttctccatttcctgagtgctaggcttacaagtgtgtgtgtgctaccataatggctttaaactgtgtgatttagtgaagaaaaggccatggagaaaaaccatatgatctcatagttgtcagctaagaggaaaatgtgtggatcacatggttttagaggtcgggataggggactcaggagggaaggggacaggcagtatggagaaaaatcccaactctctcatcattctatattttccttcatcaccacctcctgacagtctttagaataatatttgtaccaaatcctggatggctgagggacatgaggttatacaactattaaatagtaaatagctttaaaacccaagcttcttacattaaaaatgttaaatattcttatccaccacagaagtgaaaatcaaacttacattgagcttctgggtctcccagcaagaatgcctattgttaagaaaacaagcagcaggacatttggtggggatgaggggggaagggcaactctcgtacacttttgatgagaatatgaatttttgtggctactatggaaatcactaaggatggtatctcaaaaaatttaaattgggaataacatatgatccaggtggatatatgccaaaatggatcaaagtcagcataagctagagctatctcatagtgcttattactgtgctattcataataacagtgctctgaaatcaacacaggttgactatgaacaaatgacacatgaataaagaaaatgtagtgtagggacacaattaagttttaattaactataaagaagaaagaaatcatgtcaattagaggaaaatggatgaaagtagagatcattatgttaaacaaaataagactcagatagacaaatattgcatgttttctcttgtatatgatctagagtattaacattatgaaagcataggagaggctctttggaaagaagaatggtattgtcaggaaggggtaggaaattgtactatgggtaaatatcaaaattaataaatatatgaaaattatatcatgaaacttgttattttgtaaattactgtaaacctaggtttcttggtgcactattaagcaattcattaccttccatacttatgacagtcattctgaagtgctgccttaggcttttgattgctgtaatgaaacaccctgaacattttgaggtgtaaagggttcatttcatcttagatcttgtagttcatcatctagatgggcccacttacctcagtcatcaagaaaatgcaccagaggcttgcccacaggccaatctggtgaggatattatctcaactggggttcccaattcccatatgacttagcttgggtcatgttggcaaaaactggtcaccagaaggactaacacacactttgtgactataggacactgagcacctctctctgagatttgttttgactgctctctttcatttgctgttaatcatatttgcaccgtagaagtgaggaggagagcagctagtcagaaggtctagtcaacggattctttggaagcagaagtcatcatcatctgtgagttgtgaggctgtgtgggtgggaagcaaggttcatctctttcgtagcagtttgtcattcttcctagcattttttttttaatttttaaaagcgaaccttactctgatagtctaaggttgcacatgtcaccgtggagattcttatctttcctgatgttccccaatgttgttacttattgtgagtccaattctcctctgtttgggtgggctgtatgactgaagaaagtaatgttcgaatgcctgggatttgctttaatgaaacacacaattgtgtcgttgaaattgctccagtctgtgaaatctagtgtgctgaacaaaaatgttaaattgatttcaaaggtggaagggcctgataatttttatttctgtcttattatttctgaggaagctgaatgtggacagtagggggcagtgtttaaaaagctattgttcaccagcagttacttttagcaaaaactgcagtgttctctgtgaaccactgagtagggcaaatctatgaaggtacatatttatattttttaaatggaagactttaagcaattgtgttcttactatattaaaaattaaaagttagctggatggtgataggtcatgccttaaattttaggattaaatctaaatttaatctcaggaggcaaatgcagatggatctgatctctgagtttgaggttagcctagtctacagagcaagtttcaggacagcaagggctacacagagaaactttgtctcagaaaaatagttccacccccaacttttcaaaattaaactatagaaaataatttaaaacaatttaaatttattaaaatttaaattatcgaaatcatttaaaaatgattttttaatgatttcccatacctctttgtacttttcgacctacaaaggtacctcttttaacaatgtaaagttgtgtctttggaacatgtttttaataataaaaaaaaaagcagcatgaatcctttccacacttaaaaatatttcttttcttctatttgtcctctcctttgctctttccttctggcaggacaaacattccattatttgactagattaaagttttggtgggaacagtgaatatcctttaatagaactgactttggagttgggggcttagggaaggaggtgacttggaaaatgcaattttgatttggataatttccatcattagtgtcttctcaatttccactgcacggtgcatgattcctctggaggaaagaacctggcaagggatgctaagggctcaagtcagagaacatagcccagggtttagatttactctttagctctaagtagaaaagaccttgcagcatgtctctgaaatacaaggtgagcatgtatcagaacaaaatgacaagaatggccaaaacagcttgtagtaagaaccatggcaatgtatttctctgttaaatgtaaagggctcatgaatgatgtatgagtgtgctatgtcagaaacatagataatcacatgtgtctcccttccatgtcagaatgtactgagtaaaaataaattcacaaggtatgacagttttattggcaacaataggctgagcacccctattctcaacagatctggctgaggcaaatgtaagttgttttatcacagatttatttactaatatcaactctcagatcaaagctcaaattacacatcacactgaatatctctatatacattatagaatggttcctaaggggctaagaaggcaacagcagaatgtaaaggagtttcaaggagacttgagaggcagaatctgatagagatagaaactgtctatgggctaacaaattgatgttgcagatgctgctgctgagtcaggctgcagggccagtgttgagctgcagaaatgatgtatagtgcaagctatagaggtgaagggctggatgggtctagacagatgaacaggtaggtgaacagatagcaattcaaggaggccatgccaactgtgggaatggaactgagctgaagtctctgggacaatcaggaatttctacctctctattcctggtcacacactgggtagttaggtgatagcttggtgggatcaatatctgcgttgtgtccccttctttacggggtccagtgaggcacttatattctcccaccagtcatatatgtctgacaggttcttgagcctgttctcttttgctatgatttaataatccgtacacgtctgtagttcccgtttactttaattaatttatagggtagcaccatttttgttttaggaatgagttgttgttcatcagcttgtgctctctgggtgggactggacagacggtgttgtgcacgagctcaccaaatacagtcattttgctcttacattgcactaaaagtggagtgaaatgctgcttatgaagtagagtctgtacaaggcaatacacagtctgaaaacttctgtcttagacagaataaagtaacttagggtagtgtataccctgatcgcaacaaatgtattcatcataaaattattgtagttgtaagaataaaggcaatgaccttctagtttactctataccatgaaaaatgtcttaagacccaagtatggaaatacaaactttaaagattttgaaaatattataggagaatatctctgactgaagtaaagagaagagttttgtagacaacacagtaaaaccacaaaggaaaaatatgttgataaacttgactactttttaaaattaaaaacttttgtacatcaaaaggtaacattaaaaagttaaaagtttgccaggcaccggcatagtctcacaagagacagctatatgagggtccttttagcaaaatcttgctagtgtgtgcaatggtgtcagcgtttggaggctgattatgggatggattcccgggtatggcagtctctagatggtccatcctttcatctcagctccaaactttgtctctgtaactccttccatgggtgttttgttcccaattctaagaaggggcaaagtgaccacactttggtcttcgttcttcttgagtttcatgtgttttgcaacttgtatcttgtatcttgggcattctaagtttctgggctaatatccacttatcagtgagtacatatcatgtgagttcttttgtgattgggttacctcactcaggatgataccctccaggtccgtccatttgcctaggaatttcataaattcattctttttaatagctgagtagtactccattgtgtaaatgtaccacattttctgtatccattcctctgttgaggaacatctgggttctttccagcttctggctattataaataaggctgctatgaacatagtggagcatgtgtctttcttaccagttggaacatcttatgccagtgcctggtaaacacagaagtggatatccagctcacagtcagctattggatggaacacagggcccccaatgcaggggctagagaaagtaccaaaggagctaaagaggtctgtaaccctataggtggaacaacaatatgaactaaccagtacccccagagctcatgtctctagctgcatatgtagcagaagatggcctggtcggccatcattgggaagagaggtcccttggtcttgcaaactttatatgccacagtacaggggaacgctagggccaagaagtgggagtgggtgggtaggggagtgggggtggggagggtatgggggacttttgggatagcatttaaaatgtaaatgaagaaaatacctaattaaaaaaaatgttaaaagttaagtcatagaatcttggaagaaaaatccagaataaaaaaccaaatctttcaaattaaataggaaaaagaggcccagtttaacaggggggggtgggggggaagggaagcatttaagtccgctattacaaaacatgaccaaccccatgaagcctttgtggatggtggtaggaacctgtgctggctagttttatgccaccttgatacaagatagggtcatttgagagagggcaacctctattgagagcattcctccattattctcctcatctttctttggtcatgcagtttcatcacagcaatagaaactcttaactatgcattggacatatggtatttctaatgggaaataccacttaaaagttcttgtgaaagtgtgcctataacctacaattttgtatctatatatgtacatgtagaaaatgaaacttttctgaactttctagagttcaaaaataaaagttgaagaagcaagttgtaagagctgtgggcagagaggagggatggaggtgaatatggtgaaaacaatataatcatgtatgagaatatcagcgaaacacattattatgtataattaatatgtactaataaaataaatataatgaaaataagctatttaagcctgtagggttcacaaaacattgaacataatttctacattattttaatacataattaattcggatctgagaggtttttaaaactaagaggaccccttagccatctaccagaaaactagtagtataaaccatgagctttgtgttgtcctctattccgtcaggaaatatatttttttcccagaatttcaaaatgctgtagccatctgcctaacctcatagtgagtttgctatatttacatttcatactaaacacattatttactcatgatgataccatctcttcagcagaagagaaacttactgaattacttacaagatttcaaaacatccctccaggaagcactctaatcagctgtgggctggttccagaaagtgaccttgtgctaacactcatgcttttatcttatttttccccacacatacaacagatgtgctgtaaacagatactttgttcccatcttctgtaaacctgcactgctgtgtttgtttatcttacctcctggtggaggaaatctctggcaagctctctctatattctttgttataatttcacttaaagtattaaaaaagaaaacctagtccaacttaacattaaagcttaagaccagggcatggtgccatatgcaatctaagcacttggaaaaggaagaggtaggaggacagagttcaaggctggcctctgttacatagttggaggctaatctgtattgtaggagaccctctcttaaaaataaatataaacaaatcaataaccttcagactgtagttcaatttataactttctcttttctctagtttggcctgctttgttggaaatttgaagaaaggaaagaaggaatgagcagacgaggaaagacttagaaaagcttagccagattttttcttctcttacaaatattttattaactatttgagaattatgtatttaagaaaaatatattagattttgaccatattaaccccttcctctaactcctcccagatcacctctgatttcatactggctcaacattgtgacctcaatctttttaaaaactcaattagttcagttagtgctgcccatatgcttttgggtgggtggccattcactggaacattttaacctttcatagggtacacactaaaaaaaacgatttcccagcagctgtcagttactaatacttctcaattaggggtggggctgggtgaccactttctgcctctgtgctgggatttttgtctggcttgggtttatacaggtcttatgctgttacaactttgtataaactggaatccaaaactggaagctgctttgtgaaatattctttaaaaatagattaagttcatatacaatttgattagaatttttcatgccttcttccttaattactatgattacatgtatttgtacatatgtatatgtaaatataacctgctaaatatacttagtgttggtagtatgtacgtgtttagagctgactacttgagattaggaaatctgtgaggggcttattcctacaaaatactggctttgggtttttttttttttttttttaacagtcattaattgcctataagtcttcttctaggagtaaggtcttatgagatttcccctctccactctgaaacagcagtcgatgttgctactatgcaggtatttagggttctctgtcctgtataggagatactgtctcaccgtagatgtcctgatcctcaggctcttacagtctttcaagtccttctgtgctgtttcctgggcctttagatgtatcagctgtagctgtgcatcttgcagtgaacactctatgttttgaccaggtgtggatttctgggatgcttttcatctgtggtggtttgaacaggaatggcccctacagactcatgtgtttgaatgcttggctcatagggagtggcgctattaaaatatgtggccttgttagagcaggtatggccttgttggaggaagtgtgtcactgtggaggcaggctttgaggtttatttattttaaattaaatttaattttattcttttacatattcactttacatcctgttcactgcctcctcccagtcgttagatttttccagttcttcccccatcccacttcccctcctcctctgagcagattggtgccctcctgggtatttaccccattctggcacttcaagtctctccaatgctaggtgctttctcttccactgaggccagacaaggcattgcagctagcagaacgtatcccacgaacaggcaacagctttgggatagaccccattccagttgttcaggacccatatgaaggtcaaaactgtacatctacacaatggaatactattcagctactaaaaaaccaagacatcatcaattttgtgggctttgaggttttataagctgaagtctggccagtgtgacatagtctgctccgctgtccacaggatcaagatgtagaactttcagctccaacacaatgtctgccccatgcactgccaaactccctgccatgatgatagtgaactaaatctctgaaactataaaccagccccaattaagtgttttcctttatatgagttgctgtggtcctttgttccctgtcatggcacctgtgttcgactttcctctcttccaaaaagtcgtctccttccctggccccatgtttcattttactttcctagtttgtgcagttgctccatgttattggttcacatttaaagatttagagataggatccataaataagagaaaacttgtagcatttgtctttctgggtttgggttacctcatttagaacagtatttttctaattccatccattaatctgaaaatttcaggattttaattttctttgcagttgaatactattccatagtatgtatggacaacattttcaatgaccattcaagagcaccagttgaaaaatatttaggttgttcccatgtccctgctattatgaatagaatgccaatgataatggctgagcaggaatatttgcagcagaatatttcatgttctgggaaaatgccaaagagaggtatcactggtcatatggtagatttaatttttttttagctatttgagaattctccacactggtatcctgagtggctgctccagtttttaatcccaccagcagtgacagagttttctcctttctcccacatctcttccaggatttgttttcacgattttaactattgcaactggcgtaagatgaaatctcaaagttgtttttatctttcacttctcactcattcattcatgatccagttcttccctgctgttagctgctatttgtgatttctttggagtcagacccctttggagaaaacatgtcatctatgggtatcaaaaccaaaacaaagctgcccctcttgcaacaaacaaaacaaaacaaactaggaagccagtttttgaccagctatgctttcagaaggtctctgtgtttctgagctctgctgctggccctgtgtgtagagggagcacttacatgctataaatacttataaattgcagttctttggatgctcctggctttttgtgatcatatatacacaaggtatactgctaaaatcccctggtgttataggtgatctttcatgggtacagttccttttaacataaactattaatgttttcctgatggttcatttggctcaggagtgccatttattttatttttctgttacttctgctgctcttagctgatctaaacattacctctatgatactgttttgaagtcaccattatatggtcctatggtggattgagtggactgtccttcctctatgtaagatggactaccttggactctttataaagaagtgcctcctaaatatcttatagcctcctacctttccttgagtattcttcagtgcatgaaaacctatggataatgaaccactttcataatattttagtattttctgctttggtcttccaacatgtagggggtctaaagctttagttgaactacctgaggacccagcaataccactcctgggaatatactcagaagatgctccaacatgtaataaggacacatgctccactattttcatcacagccttatttataatagccagaagctggaaagaacccagttgtccctcaaatgaggaatagatacagaaaatgtggtacgtttatacaatggagtactattcagctattaaaaacaatgacttcatgaaattcataggcaattggatggaactagaaaatatcatcctgagtgaggtaagccagtcacaaaagaacacacatggtatgcactcactgataagtggatattagcccagaagcttggaatacccaagatacaattcacaaaccacatgaaactcaacaggaaggaagaccaaagtgtggatacttcattccttctttgaagggggaacaaaacacccatggaaggagttacagagacaaagtgtggaatagagactgaagaaatgaccatccagaaactaacccacctggggatccatcccatttacaatcaccaaacccagacactgttgtggatgccaagaagtgcttgctgacaggagcctgatatagctgtctcctgaggggcttttccagtgcctgacaaatacagaagtggatgctcacagccatccatcagactgagtatagggtccccaataaaggagttagagaaaggacctaaggacctgaaggggtttgcagccacataggaggaacaacaatatgaactaactagtactgccagagcttccagggcctaaaccaccaaccaaagagcacacatggtgggactcatggctctagctgcatatatagcagaggatggcctagtcggtcatcaatgggaggagaagcccttggtcctgtgaaggctctctgccccagtgtaggggaatgccagggccaggaagcgggaatgggtgggttgatgagcaggggcaggggggacgtgatgggggagggtgatttttagaggggaaaccaggaaaggggataacatttgaaatgtaaataaagaaaatatccaattaaaaaatttaaaaaaagaaaagaaaaagacaagtagtcttgtttgaacattgtttagctcaactcttgattaagaaatacactattttcaggaagtaaacagtatctattctccagtaaatagcatttaacagaggtttatgcaagattttgctctctttttgtcacttacctcttttcttttgagtgtttagaaggataaaataattaatataaaataattaacatatttttgtcatttatcacctaagccataattgataccttgtgttaacaaaacacaggttactgagaaaaaagtttggcaagattgcttagccaagtttgatgagatatgagattcctcacagatgaagattcagagacttgaagaaaattgcatttttatgtttgataaagaatggacagttgtctagaaatgtagataaaggcttataatcatatgtagataaaatgggaagatcttcaaaacatcaagtagagtaaacatgagttttctattttcaagatttttaagtgtgaaaagataatatttttttaattagatattttatttatttacatttcaaatgttatcccctttcctggtttcccctctgcagaccctctatcctattaccccccttactctgcttctgggagggtgctccccaacccacctacccactcccgcctcatagtcttagcattcctctacactggggcatcaagccttcacaggaccaagggcctcccctcccattgatgctagctatggccccttcagcaacttcagtctttcccttaattcctccattgtgatccctatgctcagtccaatgattggctgtgagcatccgcatcgatattggtcagaatctgtcagagcctctcagaagacagctgtatcagacccctgccagcaagcacttcttggtatccacaacagagtctaggtttggtgtctgcatatgggatggatcctcaagtgggacagtctctggatggcattttcttcagtctttgctccactctttgttcctgtatttcctttaaacagtagcaattctgggttaaaattttggatatggctgtgtcgtcccatccttcaaccaggggctgtgcctaacctatgagtatggtcccgacagttttgccctccccgtttgtggggtatttcagttaatgacatccctgtggggtcctggcatctggaactttgtggttgctttgcccagttccacatccccccattgctacacacctctgttcaatttcctgaccctctgtgtatttcctccatctcctcccatacctgattcttcccatctatttcccctcaccctcttctcttccttccaagacccttccgccctctacttcccttaattattttgttccaggtcctatgtaggaatgaagcatctactctttggtgtaccttcctcttgagcttcatatagtccttgagttgtattgtgcatattccacgatctttgcttgatatctacttattagtgagtagatactatgtgtgttcttttgtgactgaattacctcactcaggattatattttctagatccatccattttacctatgaatttcatgaagtcattgtctttaatagctgagtagttagcactccattgtgtaaatgtaccacattttctgtatccatttctctgtcgagggatatctgggttctttccagcttctggctattataaatatggctgctatgagtatagtggagcatgtgtccttattaaatgttggagcatattttggatatatgaccaagcatggtataggtgggtactcaggtagtactatgcccaattttctgaggaaccaccagactgatttccagagtggttgtactagcttgcaatcccaccaacaatggaggagtgttcctctttctccacgtccttatcagcatctgctgtcacctgagtttttgatcttagccattctaactggtgtgaggtggaatctcaaggtcattttgattttcatttccctcatgactaagggtgttgaacatttctttaggtgcttctctgccatttgagttttctcagttgagaattctctgtttagctctgttcccaagtttttaatagggttatttagttctctggagtctaatttcttgcgttctttgtatatattggatattagtcctctattggatgtaggatttaaagatcttttcctaatctgttggttgccattttgtcttattgacagtgtcctttgccttgcagaagctttgtaattttatgaggtcccatttgtctattcttgatcttagagcataagccattggtgttctgtccaggaaattttcccctgtgcccatgtatttgggattcttcaccaatttgtctttcattagcttcagtgtatctggttttatgtggcggtccttgatccacttggatttgagatttgtatagggagataagaatggctcaatttgcattctgctacatgttgactaccaattgaaccagcaccatttgttgaaaatgctgtctttttttttcactggatggttttaacttctttgtcaaaatgaagtgaccataggtgtatgggttcatttctgggtcttcaattctattccattgatctacctgcttgtatctgtaccaataaaatgcagttttttatcaatattgctctgtagtcaatattgcttgtggtcggggatggtgattccactagaggttcttttattgttgaaaatagttttcactattctgttttttttttgttgttgttgttttttttttggtgttgttttttttttttttttttttctccaaatgaattttcaaattgttctttctaactctatgaagaattgagttggaaatttgatggggaaatgcattgaatctgtagattgcttttggcaagatggccatttttgctatattaatcctgccaatccatgagcatgggagatctttccatcttctgaggacttctatttctttcttcagagacttgaagtttctcttgtacagatctttcacttgcttgattagagtcacaccaaggcattttatattatttgtgactattatgaagcatgttgtttccctaatctctttctcagcttgtttatcctttgtgtagaagaaggctacagatttgtttgaaataattttatatccagccactttgctgaagttgtttatcaggtttaggagttctctggtggaattttgggggtcacttaagtatactgtcatatcatctgcaaatagtgatattttgacttcttcctttccaatttgtatccctttgatctccttttgttgtttaattgctctacctaggactttgagtactatattgaacaaatagggagcgaatgggcagccttgtctagttcctggttttagtgggattatttcaaggttctctccatttagtttgatgttggctactggcttgctgtatattgcttttactgtgtttaggtatgagcgttgaatttctgatctttctaagacttttaccatgaaggattgttgaattttgtcaaatgctttctcagtgtctaatgaaatgatcatgtggttttttttctttgagtttgtttatatagtgggttatattgatggatttctgtatattgaactttctctgtatctttgggatgaagcctgtttgatcaggatggatgattgttttgatgtgttcttggattcggtttgtgagaattttattgagtatttttaatcaatatacataagggaaattgctcttaatttctctttctttgttggatctttttgtggtttagctgcagccactagcagccacaggttactgggttcctgaaaggaaagatggggtttggatgggaaaggcagtaaaagaaataaagacccaaggcaacgttttctgatcaaggccaatgtttactcatgacagggtttttttttttctggatttacttgaggtttactttgtcaggatagcttgaggaaaacaagttcagcctctcagcacgtagtggcgtcttggaggaaaccacaggcgtggcaagacaatagactttacctaggtcggaagactccaccctaggtgggctagcaactgtggcaaaccaggtctgagccagcctgctcaagactgcagggagggcacatttaggtatgagtgtaattgtggcttcatagaatgagttggttagtgttccttctgtttctattttgtagactagtttgagaagtattggtattaggtcttctttgaagatctgatagaattctgcactaaacccatctagttctggggtctttttgattgggagacttttaattactgcatgtcttagtcagggtttctattcttgtacaaaacatcatgaccaagaagcaagttggggaggaaagggtttattcggcttacacttccatactgctgttcatcaccaaaggaagtcaggactggaactcaagcaggtcagaaagcaggagctgatgcagaggtcatggagggatgttcctactagcttgcttctcctggcttgctcagcctgctctcttatagaaccaagactaccagcccagagatggtcccacccacaagaggcctttcccccttgatcactaattgagaaaatgccttacagctggatctcatggaggcacttccnnnnnnnnnnnnnnnnnnnnttattcggcttacacttcccatactgctgttcatcaccaaaggaagtcaggactggaactcaagcaggtcagaaagcaggagctgatgcagaggtcatggagggatgttcctactagcttgcttctcctggcttgctcagcctgctctcttatagaaccaagactaccagcccagagatggtcccacccacaagaggcctttcccccttgatcactaattgagaaaatgccttacagctggatctcatggaggcacttcctcaactgaagctcctttctctgtgataactccagctgtgtcaagttgacacaaaactagccagtacactgcacctatttctttaggggttatggaactctttagatgatttatgtgatcctgatttaactctggcacctgggatctgtctagaaaattgttcattcattcagattttccatttttgttgagaaaaggtttttgtggtaggatctgatatctttttgaatttccttggtttccatagttatgtctcccttttcctttctgattttatcaatttagatactgttttgtgccctctggttagtccggctaatagttgatctatcttgttgattttcccagtgaaccaactcctggttttgttgattctttgtatagctatttttgtttctgcttggttgatttcagtcctgagtttgattattcctgatgtctacttaccttctgtgtttacttcgttttgttctagagctttcaggtgtgctgttaagctgctagtgtatgctctctccagtttctttttgaaggcatgcagagctttgagttttcctcttagcactgctttcattgtgtctcataagttttggtattatgtgccttcatcttcattaaattctaaaaaagtctttaatttctttctttatttcttccttaaccaagttatcattgagtagagtgttgttcatcttccatgtgtatgtggggttggtttctgttgtttttgttgttattgaagaccagccttagtctgtggtgatctgataggatgcatgtaattatttcaatctgttgaggcctgttttgtgaccaattatatggtcagttttagagaaggtgccatgaggtgctgagaaggtatattccttagttttaggatgaaatgttctatagatatctgttaaatccatttggttcataccttctgttagtttcactgtgtctttgtttagtttgtgtttcaatgatcagtccattgctgagagtggggagttgaagtttcccattcttattgtgtgaggtgcaatgtgtgctttgagattaaataaagtttctcttatgtatgtggatgcccttgcatttggagcatagatgttcagaattgagagttcattttggtaggttttttcctttgatgagtatgaagcatccttccttatctttgataacttttggttgaaagtcacttttattcaatattagaatggctactccagcttgtttcttgggaccatttgcttggaaaaaatttttctagccttttacacttaggtaatgtctgtctttgtcactggggtgtgtttcctgtatgcagcaaagtgctgggtcctgtttttgtatacagtctgttagtctatgtctatttattgggaaattgagttcattgattgtcctgacccgggggacccagttattcagggggtctgaagggaaccttgcctgaaagagaaactggtgggaaagaagagctagaccaagtagatgatcctatcaaggtctgtttattgcgagtaaggttacagaatataagcggtaagaaggaggaaggaagcaaagagggagaaacttgcctgtgcctcagtccgggggcaggggtggttctgcataactgcccgggaaggtgctatctactcttagctcaggggacattctgtggtttttcacaggaagtttatagatactattatctgatcttcatgttctgtcagctgtcatttcaaaaggtcgaagtctctccaggagggagtggaactttggcttatgattcagtgtcagtccccaacatctctcaaaaggacagaagtttctcaagaagggaggggagctttggcttatggctcaatgtaggtctccaacaatcgatgttaagagatattaaagaaaagtgattgctacttgctgttnnnnnnnnnnnnnnnnnnnnctttggcttatggctcaatgtaggtctccaacaatcgagttaagagtatattaaagaaaagtgattgctacttgctgttatttttgttgttagaggtggaattatgtttgtgtgcctatcttcttttgagtttgttgaaagaagattatttttttgctttttctaagggtatttcccttcttgtgttggagttttctatctattatcctttgtagggctagatctgtggagagatattgcatacatttggttttgtcatggaatatcttgttttctccatctatggcaattgagagttttgttgagtatagcagcctggactggcatatttgttctcttagagtctgtatgacatctgcccaggttcttccagcctttatagtctctggtgagaagtctggtgtaattctgataggttttcctgtatatgttacttgacattctccccttcccgctcttactattctttctttgttttgtgtacttggtattttgactattacatgatgggaggaatttcttttctggtccaatctctctggtttttttttttttttttttttttttttggggttttcgagacagggtttctctgtatagccttggctgtcctggaactcactttgtagaccaggctggcctcgaactcagaaatccacctgcctctgcctcctgagtgctgggattaaaggtgtgcaccaccaacgcccggctggtccaatctcttttgagttctggaggcttcttgtatatttatgggcatctttatttagttagggaagttttcttctataattttgttgatgatgtttactggccccttacgttgggaagctttactctcttctataactattttccttaggtttggtctactcattgcgtcctggatttcctggatgttttgggttaagagctttttgcattttgcaattttattgactattgtgtccatgttttctatggtatcttctgcctgtaagatttttctctttcatatcttgtaatctgttggtgatggttacatctatgactcctgatctctttcctaggttttctatttccaggattgtctctcttagtgatttctttattgttactatttctatttttagatctcggatggttttgttcaattccttcacctgtttggttgtgttttcctgtaatttgttaagggatttttgtgtttcttctttaagggcttctatctgtttaaagttctcctgtatttctgtaagggagttatttatgtccttcttaaagtcctctatcatcatcatgagatgtgattttaaatcagattcttgcttttctggtgtgttgggttattaagggcttgctgtggtagaagaactgggtttggatgatgccaagtagccttggtttctgttgcttatcttcttgcccttgcctctcaacacctggttatttctggtgttagctggtcttgctgtctctgattgtggcttgtccctcctgtaagcctgtgtgtcagcactcctgggagtccacttctctctcagaggaatttggatatggaaagctgtggcacagggtcagctccacacacagacggaaacaggaaggttcttgtggaaaagataatttttaatatgataaaatgttttcagtaacttaacataaatttcaactatttaaacctaagtggaatataacttttccatattccagatttctaaatatatattttctccaacaataaagatgatattgagttacttctgtgtattagaactgctgtgagaaatattaagactattgtgatattgtgatagttttcctataaactgtgagattaagaagctctactggactgcttgacatggtagtaaatgtttgtaataccagcacttggaagtctttgcttcataggaagattcatggctgaggctggagctcagttatataatgcttgcctagcctcagcaaggctctggcttctatcccagcttcacaggcaacatgccctgtgccctccccacaccctggaataacaaaactctactggagtatgaataaaataattctttcttatattaaaaaggaaattgctgttcttaaatgagttatcagctgggtatatctataggtatgtaagtgtcatttgtcatgaaaatattttttgatgaacgtttataaaagtgggactttactccattcctgcatacttttctttttcttattttagtgatgaaagagaaacccaagacttaagggaaagttaagcctttttcctacatgctatgaaactctagctattaggaccaaaacatatatatgaataaatatatagaataaattggattaacatttagtgtctaacttttgatatattggtacaatagtccacagtttaataaatctcttagaggggttggggatatgattcagtaggtaaagcacttgttatgcaagcatgaggaattgtttgatagcccaacaagcatgtaaaatctggtgtggtggtatacttctagaattcaactcctcaggtgatgaagacaagcaaaacatgggacgcagaaacagtgaactccaggttcccagatagactttctcttaaaaactgaggtggagataaatagagatacctgacatcaacttcctttcctatacctgcatgtatgggtgagtatatgtgcaaactccccacttcccgcaaaagaagctcttgggaattagggaccagaaaaaggaaaagatgacaattttagttaatgtgaaattagtaattatttcaaaacctttagaaatcgaatgtctcacagattgtaacaaatgaatgtgccaaggcttagccatcttccaaaaactgtcatcagaactaaataatttccctttatagtaataggcctggggaaaatccataatttagaagacgaaatgatagataagaaattttatacttaagaggataaagaataaatgtcaaaatttaaatagcatttttcatggatgctaatggttttttccattctttcagtagtattataagccagcaacacagtacaacagtaccatcttagtcctttatttgaaccacagcatatttgttcacaaggtcaaaagtatatagaactcttattctatctatctatctatctatctatctatctatctatctatctatctctatatatatatacttaggaatattcataggcttcaattgcagaaccagggatatgcgtttatggagactgtaaaccaaacaaaagtttcataagtgaaaaatagcaaagctaaaaatactggcagaaagttgattatgagaacgtttattctaacaaacaacttattaaaataggcaaagggtttgaatacacatttctccaaagaaagtgcacagatggctgacaagtacaaggaaagatgttcaatattattagcaatcaaataatgcttaatagggacatctaaatcaagagaataggagatactgcttcatacctactagaatggctacaaaaggaagtaggatgggtagagaggaagaaagaagagttgatagggatctggagacactagaaaacttgttcagtgttagggtcgagtatctgcaatctcagaacttgggaggctttttcagggggatcaacagtctgaggttagcccaggaagcattacaaaccctgtctcaaaactaaaattgggaactttgtacacacatacatacacacacacatacacaaactcacatatacatagtcacacacatacacccacatactctctcatacctacacacttacacattggcatacatgtacacatatatacacactcacacacacagaagcatatatatgtacacacagaaggaaacattattcagcttaaaaggaaggaaagtgaagaacatataacaaaatagatgagctttaaagatattatgccaagtaaaataagacaattaagagaagagacagatactatttgaatctgtctatatatagtatccagagcaatcaaattcattgagagagtagagtagtggttgccatggcttgcgggggagtggaatagggaattgtttaatacatacaggtttggaggatgaaagacttataaaaattatccagcaatgtgaatgtacttcatgtccgtggatggtatacttttaaagtgtaaagagcagtagagactaatccagtctgtgatgaacactataagaaacatttggattacaatgatacaccattaagccatgttttaatatgtgttgtttacaaatacaaatgtttaatgactgggtagtacatagataaacagtcttttttccaataacaaattgctgcttatgtgtaccaattaaatgtactcaagggtcttgtcttgttctttcttttcttctttttaacataaaagataagcacagtattaatcatgcagctgacacttgtttttcaagtttggggccaaaattttatttatatactgatttatgtttttagatagattcttgttgctgttgatattaacattcaattataataatttgtcatttctaatattgtctacaaaattcttaattattgaggaaaaagaatttatagtaacactttctgataagcattgcctggtatgataaatcgataccatgattgctggttttactttaaaatagaaatagatgctatactgctagtccttccactagtggtaactctgggactgtttgttacctgaatctggagttctaaccaaaaatgtaattagcaattcccagagctcttttccctgcctttgcctcctttcagctagccaaccaaccagtaaatgtatagaacaacaacaaaaatgagtcataaaaggttcaagggatagaccaaatggtatatacaggcaggcctattagaataactcctgacattccaatggagtttacaaaagccagaaagacctagccctagattgatattctgtgagctctgaatgagcacagatgccaacctagaacacccagaaagaggaatagtgatatcagaagagtggaaagcttatgaattataatagaaggagaaagaaaaatatttcaggataaaaacaaatttaagcaacttctgtctactaatgtatttctacagatgacactagaggacagttgtcagtctgaagagcatgttaactacactaaataggacctgctctacaaacaaccccaaaactattatccaaaggaggtgtaaaaaacaacatcgcaacaacaaaataatgtgaattaataattactgttcagcagtaactttccatatcaatagtttgaatacccaattagaaggcacatatttagagattagattagagtttttatttttctcttgcctctaagaaacactcccaccatcaaggacagacactacctttgtgtaaaaagatagaaagggtatttgaagcaatgagtcaagaagcaaatggacagaggtgttttcatatctgaaaaagtagacttaaaaaccaagactaatcagaagagatagggaaggtcgctgcgtacacattaaagaaaaatatctgtcaagaggacattataattctaaacatttatgcttcaaatacaagggcacccagctttataaaataaacactgttacatttaaaatcacatattgaccctcacacagtgatgatgggtaannnnnnnnnnnnnnnnnnnnattagagtttttatttttctcttgcctctaagaaacactcccaccatcaaggacagacactacctttgtgtaaaaagatagaaagggtatttgaagcaatgagtcaagaagcaaatggacagaggtgttttcatatctgaaaaagtagacttaaaaaccaagactaatcagaagagatagggaaggtcgctgcgtacacattaaagaaaaatatctgtcaagaggacattataattctaaacatttatgcttcaaatacaagggcacccagctttataaaataaacactgttacatttaaaatcacatattgaccctcacacagtgatgatgggtaatttcattaccctattctcactaatacacaggttatacggacaaaaaccaactaagaaagcaagcaagaaaccaaccaaccaaccaaccaaccaaccaaccaaccagccaaccaaacaaccaaacaaccaaacaaaaaccccaaccaaaccttcaaatacctgcccccaccaaatctctggacttaattaacaccataaatcaaactgatgtaaaacacacctatagtgtatatcaggcaaacagaagaatgcacattcttttcagcatccgatggtactttctttcaaactgtcagcttattaggacacaaagcaagctcgaaccaaaagtatacaaactcatggaagataaacaagtcactattgaatgaaaattgggtcaagacaggaatcaagaaggaaattaaaaacttactagaattgattgaaaatgaaaacacaacatacccaaacttatgggataaaatgaaggccgttttaagaggaacactctgattgtctacatcaaaaaacctactaataacttaatgatatagttgaaagctttagtaaaacatgaaacaacactccaaaatagtgaatgggaaaaataatcaagctcacagctgaagttagagaattagaagcaactatagcaacaacaacaatgaaatgaatagttggtactttgaaaaaataaaaatgaacaggatttatttagccaaactaaccagacgaaagagaggatccaaattaatagaattagagatgaaagggagacactacatctaacaccaaagaaattcagagaatcatgtgatatgttataaaaatctgcatgctaccaaactggaaaacctaaaaagtagatggatgtcttgatataaaagatctgccaatgttaaatcaatatgtaataaacaattaccctaacagaatcctaacgctataataaatcaaagcaattattaaaaatatctcaactaaaaaaggcaatttacagcaagtctaccaacatcatcattttaaatgtggagaaaatcaaagcatttttactataatcatgaaaaagacaaagatgttcatttctccatacctactcaatacagagttcaaagtcttacctagagctgtaaaacatcaggaggtgattaaggggatacaaataggaaaggaagaattcaaagtattcttgtgtctacctaaagatattaccagggatcctctttgcctaataaatactttcacaaaatgtagcagaaggattcaaaattgtgggtcacaaataatataaaatactttggtgtgattctaactaagaaagtgaaagatctgtgtgagaagaacttcaagtcttcgaagaaagaaatagaagatctcagaagatggaaagatctcccatgctcatggattggcaggattaatatagtaaaaatggccatcttgcctaaagcaatctacagattcaatgcaatccccataaaatttccagctcaattcttcatagagttagaaagagcaattggcaaattaatttggaataacaaaaaacccaggaagagtgaaaactattctcaacaataaaagaacttctgggggaatcagcatccctgacctcaagctgtaatacacagcaattgtgttagaaactgcatggtattggtacagtgacatgcaggtagatcaatggaatagaattgaagacccagaaatgaacccatacacctatggtcacttaacctttgacaaaggagctaaaaccatccagtnnnnnnnnnnnnnnnnnnnnggatacaaataggaaaggaagaattcaaagtattcttgtgtctacctaaagatattaccaggggatcctctttgcctaataaatactttcacaaaatgtagcagaaggattcaaaattgtgggtcacaaataatataaaatactttggtgtgattctaactaagaaagtgaaagatctgtgtgagaagaacttcaagtcttcgaagaaagaaatagaagatctcagaagatggaaagatctcccatgctcatggattggcaggattaatatagtaaaaatggccatcttgcctaaagcaatctacagattcaatgcaatccccataaaatttccagctcaattcttcatagagttagaaagagcaattggcaaattaatttggaataacaaaaaacccaggaagagtgaaaactattctcaacaataaaagaacttctgggggaatcagcatccctgacctcaagctgtaatacacagcaattgtgttagaaactgcatggtattggtacagtgacatgcaggtagatcaatggaatagaattgaagacccagaaatgaacccatacacctatggtcacttaacctttgacaaaggagctaaaaccatccagtggaaaaaagaaagtattttcaacacatggtgctgtctcaactggaggttagtcttgttgcgcgcactcaacaggccaggaagaacgacgctgctacaggatccttctgcacacatttattcagtcctgtttcttctttctccatatatctcccttgtttatatctcccttgtttttatatctcccttgtttatatatctcccttgtttttatatctcccttgtttttatatcgcccccgaaccctgggcctctccttttatacactctctcatccacgcacagcaggccacgccacctcaccaggcacgcagcttcagctaatcagggcagcaggggcatatctccatcaaattggattcaccggtatcctggtgcacctgcgcagctctcaagatgtttgtggcttatatgaggaagtcaggtgcaagtcatacgacttagctacagtccctggcgcctttgggactgccgccacacccgctccccacaatttccccttttttcttttttggcagagagaatgctctgtagatagccccctgcagccatgccccttacnnnnnnnnnnnnnnnnnnnnnnnnnnnnnnnnnnnnnnnnnnnnnnnnnnnnnnnnnnnnnnnnnnnnnnnnnnnnnnnnnnnnnnnnnnnnnnnnnnnnnnnnnnnnnnnnnnnnnnnnnnnnnnnnnnnnnnnnnnnnnnnnnnnnnnnnnnnnnnnnnnnnnnnnnnnnnnnnnnnnnnnnnnnnnnnnnnnnnnnnnnnnnnnnnnnnnnnnnnnnnnnnnnnnnnnnnnnnnnnnnnnnnnnnnnnnnnnnnnnnnnnnnnnnnnnnnnnnnnnnnnnnnnnnnnnnnnnnnnnnnnnnnnnnnnnnnnnnnnnnnnnnnnnnnnnnnnnnnnnnnnnnnnnnnnnnnnnnnnnnnnnnnnnnnnnnnnnnnnnnnnnnnnnnnnnnnnnnnnnnnnnnnnnnnnnnnnnnnnnnnnnnnnnnnnnnnnnnnnnnnnnnnnnnnnnnnnnnnnnnnnnnnnnnnnnnnnnnnnnnnnnnnnnnnnnnnnnnnnnnnnnnnnnnnnnnnnnnnnnnnnnnnnnnnnnnnnnnnnnnnnnnnnnnnnnnnnnnnnnnnnnnnnnnnnnnnnnnnnnnnnnnnnnnnnnnnnnnnnnnnnnnnnnnnnnnnnnnnnnnnnnnnnnnnnnnnnnnnnnnnnnnnnnnnnnnnnnnnnnnnnnnnnnnnnnnnnnnnnnnnnnnnnnnnnnnnnnnnnnnnnnnnnnnnnnnnnnnnnnnnnnnnnnnnnnnnnnnnnnnnnnnnnnnnnnnnnnnnnnnnnnnnnnnnnnnnnnnnnnnnnnnnnnnnnnnnnnnnnnnnnnnnnnnnnnnnnnnnnnnnnnnnnnnnnnnnnnnnnnnnnnnnnnnnnnnnnnnnnnnnnnnnnnnnnnnnnnnnnnnnnnnnnnnnnnnnnnnnnnnnnnnnnnnnnnnnnnnnnnnnnnnnnnnnnnnnnnnnnnnnnnnnnnnnnnnnnnnnnnnnnnnnnnnnnnnnnnnnnnnnnnnnnnnnnnnnnnnnnnnnnnnnnnnnnnnnnnnnnnnnnnnnnnnnnnnnnnnnnnnnnnnnnnnnnnnnnnnnnnnnnnnnnnnnnnnnnnnnnnnnnnnnnnnnnnnnnnnnnnnnnnnnnnnnnnnnnnnnnnnnnnnnnnnnnnnnnnnnnnnnnnnnnnnnnnnnnnnnnnnnnnnnnnnnnnnnnnnnnnnnnnnnnnnnnnnnnnnnnnnnnnnnnnnnnnnnnnnnnnnnnnnnnnnnnnnnnnnnnnnnnnnnnnnnnnnnnnnnnnnnnnnnnnnnnnnnnnnnnnnnnnnnnnnnnnnnnnnnnnnnnnnnnnnnnnnnnnnnnnnnnnnnnnnnnnnnnnnnnnnnnnnnnnnnnnnnnnnnnnnnnnnnnnnnnnnnnnnnnnnnnnnnnnnnnnnnnnnnnnnnnnnnnnnnnnnnnnnnnnnnnnnnnnnnnnnnnnnnnnnnnnnnnnnnnnnnnnnnnnnnnnnnnnnnnnnnnnnnnnnnnnnnnnnnnnnnnnnnnnnnnnnnnnnnnnnnnnnnnnnnnnnnnnnnnnnnnnnnnnnnnnnnnnnnnnnnnnnnnnnnnnnnnnnnnnnnnnnnnnnnnnnnnnnnnnnnnnnnnnnnnnnnnnnnnnnnnnnnnnnnnnnnnnnnnnnnnnnnnnnnnnnnnnnnnnnnnnnnnnnnnnnnnnnnnnnnnnnnnnnnnnnnnnnnnnnnnnnnnnnnnnnnnnnnnnnnnnnnnnnnnnnnnnnnnnnnnnnnnnnnnnnnnnnnnnnnnnnnnnnnnnnnnnnnnnnnnnnnnnnnnnnnnnnnnnnnnnnnnnnnnnnnnnnnnnnnnnnnnnnnnnnnnnnnnnnnnnnnnnnnnnnnnnnnnnnnnnnnnnnnnnnnnnnnnnnnnnnnnnnnnnnnnnnnnnnnnnnnnnnnnnnnnnnnnnnnnnnnnnnnnnnnnnnnnnnnnnnnnnnnnnnnnnnnnnnnnnnnnnnnnnnnnnnnnnnnnnnnnnnnnnnnnnnnnnnnnnnnnnnnnnnnnnnnnnnnnnnnnnnnnnnnnnnnnnnnnnnnnnnnnnnnnnnnnnnnnnnnnnnnnnnnnnnnnnnnnnnnnnnnnnnnnnnnnnnnnnnnnnnnnnnnnnnnnnnnnnnnnnnnnnnnnnnnnnnnnnnnnnnnnnnnnnnnnnnnnnnnnnnnnnnnnnnnnnnnnnnnnnnnnnnnnnnnnnnnnnnnnnnnnnnnnnnnnnnnnnnnnnnnnnnnnnnnnnnnnnnnnnnnnnnnnnnnnnnnnnnnnnnnnnnnnnnnnnnnnnnnnnnnnnnnnnnnnnnnnnnnnnnnnnnnnnnnnnnnnnnnnnnnnnnnnnnnnnnnnnnnnnnnnnnnnnnnnnnnnnnnnnnnnnnnnnnnnnnnnnnnnnnnnnnnnnnnnnnnnnnnnnnnnnnnnnnnnnnnnnnnnnnnnnnnnnnnnnnnnnnnnnnnnnnnnnnnnnnnnnnnnnnnnnnnnnnnnnnnnnnnnnnnnnnnnnnnnnnnnnnnnnnnnnnnnnnnnnnnnnnnnnnnnnnnnnnnnnnnnnnnnnnnnnnnnnnnnnnnnnnnnnnnnnnnnnnnnnnnnnnnnnnnnnnnnnnnnnnnnnnnnnnnnnnnnnnnnnnnnnnnnnnnnnnnnnnnnnnnnnnnnnnnnnnnnnnnnnnnnnnnnnnnnnnnnnnnnnnnnnnnnnnnnnnnnnnnnnnnnnnnnnnnnnnnnnnnnnnnnnnnnnnnnnnnnnnnnnnnnnnnnnnnnnnnnnnnnnnnnnnnnnnnnnnnnnnnnnnnnnnnnnnnnnnnnnnnnnnnnnnnnnnnnnnnnnnnnnnnnnnnnnnnnnnnnnnnnnnnnnnnnnnnnnnnnnnnnnnnnnnnnnnnnnnnnnnnnnnnnnnnnnnnnnnnnnnnnnnnnnnnnnnnnnnnnnnnnnnnnnnnnnnnnnnnnnnnnnnnnnnnnnnnnnnnnnnnnnnnnnnnnnnnnnnnnnnnnnnnnnnnnnnnnnnnnnnnnnnnnnnnnnnnnnnnnnnnnnnnnnnnnnnnnnnnnnnnnnnnnnnnnnnnnnnnnnnnnnnnnnnnnnnnnnnnnnnnnnnnnnnnnnnnnnnnnnnnnnnnnnnnnnnnnnnnnnnnnnnnnnnnnnnnnnnnnnnnnnnnnnnnnnnnnnnnnnnnnnnnnnnnnnnnnnnnnnnnnnnnnnnnnnnnnnnnnnnnnnnnnnnnnnnnnnnnnnnnnnnnnnnnnnnnnnnnnnnnnnnnnnnnnnnnnnnnnnnnnnnnnnnnnnnnnnnnnnnnnnnnnnnnnnnnnnnnnnnnnnnnnnnnnnnnnnnnnnnnnnnnnnnnnnnnnnnnnnnnnnnnnnnnnnnnnnnnnnnnnnnnnnnnnnnnnnnnnnnnnnnnnnnnnnnnnnnnnnnnnnnnnnnnnnnnnnnnnnnnnnnnnnnnnnnnnnnnnnnnnnnnnnnnnnnnnnnnnnnnnnnnnnnnnnnnnnnnnnnnnnnnnnnnnnnnnnnnnnnnnnnnnnnnnnnnnnnnnnnnnnnnnnnnnnnnnnnnnnnnnnnnnnnnnnnnnnnnnnnnnnnnnnnnnnnnnnnnnnnnnnnnnnnnnnnnnnnnnnnnnnnnnnnnnnnnnnnnnnnnnnnnnnnnnnnnnnnnnnnnnnnnnnnnnnnnnnnnnnnnnnnnnnnnnnnnnnnnnnnnnnnnnnnnnnnnnnnnnnnnnnnnnnnnnnnnnnnnnnnnnnnnnnnnnnnnnnnnnnnnnnnnnnnnnnnnnnnnnnnnnnnnnnnnnnnnnnnnnnnnnnnnnnnnnnnnnnnnnnnnnnnnnnnnnnnnnnnnnnnnnnnnnnnnnnnnnnnnnnnnnnnnnnnnnnnnnnnnnnnnnnnnnnnnnnnnnnnnnnnnnnnnnnnnnnnnnnnnnnnnnnnnnnnnnnnnnnnnnnnnnnnnnnnnnnnnnnnnnnnnnnnnnnnnnnnnnnnnnnnnnnnnnnnnnnnnnnnnnnnnnnnnnnnnnnnnnnnnnnnnnnnnnnnnnnnnnnnnnnnnnnnnnnnnnnnnnnnnnnnnnnnnnnnnnnnnnnnnnnnnnnnnnnnnnnnnnnnnnnnnnnnnnnnnnnnnnnnnnnnnnnnnnnnnnnnnnnnnnnnnnnnnnnnnnnnnnnnnnnnnnnnnnnnnnnnnnnnnnnnnnnnnnnnnnnnnnnnnnnnnnnnnnnnnnnnnnnnnnnnnnnnnnnnnnnnnnnnnnnnnnnnnnnnnnnnnnnnnnnnnnnnnnnnnnnnnnnnnnnnnnnnnnnnnnnnnnnnnnnnnnnnnnnnnnnnnnnnnnnnnnnnnnnnnnnnnnnnnnnnnnnnnnnnnnnnnnnnnnnnnnnnnnnnnnnnnnnnnnnnnnnnnnnnnnnnnnnnnnnnnnnnnnnnnnnnnnnnnnnnnnnnnnnnnnnnnnnnnnnnnnnnnnnnnnnnnnnnnnnnnnnnnnnnnnnnnnnnnnnnnnnnnnnnnnnnnnnnnnnnnnnnnnnnnnnnnnnnnnnnnnnnnnnnnnnnnnnnnnnnnnnnnnnnnnnnnnnnnnnnnnnnnnnnnnnnnnnnnnnnnnnnnnnnnnnnnnnnnnnnnnnnnnnnnnnnnnnnnnnnnnnnnnnnnnnnnnnnnnnnnnnnnnnnnnnnnnnnnnnnnnnnnnnnnnnnnnnnnnnnnnnnnnnnnnnnnnnnnnnnnnnnnnnnnnnnnnnnnnnnnnnnnnnnnnnnnnnnnnnnnnnnnnnnnnnnnnnnnnnnnnnnnnnnnnnnnnnnnnnnnnnnnnnnnnnnnnnnnnnnnnnnnnnnnnnnnnnnnnnnnnnnnnnnnnnnnnnnnnnnnnnnnnnnnnnnnnnnnnnnnnnnnnnnnnnnnnnnnnnnnnnnnnnnnnnnnnnnnnnnnnnnnnnnnnnnnnnnnnnnnnnnnnnnnnnnnnnnnnnnnnnnnnnnnnnnnnnnnnnnnnnnnnnnnnnnnnnnnnnnnnnnnnnnnnnnnnnnnnnnnnnnnnnnnnnnnnnnnnnnnnnnnnnnnnnnnnnnnnnnnnnnnnnnnnnnnnnnnnnnnnnnnnnnnnnnnnnnnnnnnnnnnnnnnnnnnnnnnnnnnnnnnnnnnnnnnnnnnnnnnnnnnnnnnnnnnnnnnnnnnnnnnnnnnnnnnnnnnnnnnnnnnnnnnnnnnnnnnnnnnnnnnnnnnnnnnnnnnnnnnnnnnnnnnnnnnnnnnnnnnnnnnnnnnnnnnnnnnnnnnnnnnnnnnnnnnnnnnnnnnnnnnnnnnnnnnnnnnnnnnnnnnnnnnnnnnnnnnnnnnnnnnnnnnnnnnnnnnnnnnnnnnnnnnnnnnnnnnnnnnnnnnnnnnnnnnnnnnnnnnnnnnnnnnnnnnnnnnnnnnnnnnnnnnnnnnnnnnnnnnnnnnnnnnnnnnnnnnnnnnnnnnnnnnnnnnnnnnnnnnnnnnnnnnnnnnnnnnnnnnnnnnnnnnnnnnnnnnnnnnnnnnnnnnnnnnnnnnnnnnnnnnnnnnnnnnnnnnnnnnnnnnnnnnnnnnnnnnnnnnnnnnnnnnnnnnnnnnnnnnnnnnnnnnnnnnnnnnnnnnnnnnnnnnnnnnnnnnnnnnnnnnnnnnnnnnnnnnnnnnnnnnnnnnnnnnnnnnnnnnnnnnnnnnnnnnnnnnnnnnnnnnnnnnnnnnnnnnnnnnnnnnnnnnnnnnnnnnnnnnnnnnnnnnnnnnnnnnnnnnnnnnnnnnnnnnnnnnnnnnnnnnnnnnnnnnnnnnnnnnnnnnnnnnnnnnnnnnnnnnnnnnnnnnnnnnnnnnnnnnnnnnnnnnnnnnnnnnnnnnnnnnnnnnnnnnnnnnnnnnnnnnnnnnnnnnnnnnnnnnnnnnnnnnnnnnnnnnnnnnnnnnnnnnnnnnnnnnnnnnnnnnnnnnnnnnnnnnnnnnnnnnnnnnnnnnnnnnnnnnnnnnnnnnnnnnnnnnnnnnnnnnnnnnnnnnnnnnnnnnnnnnnnnnnnnnnnnnnnnnnnnnnnnnnnnnnnnnnnnnnnnnnnnnnnnnnnnnnnnnnnnnnnnnnnnnnnnnnnnnnnnnnnnnnnnnnnnnnnnnnnnnnnnnnnnnnnnnnnnnnnnnnnnnnnnnnnnnnnnnnnnnnnnnnnnnnnnnnnnnnnnnnnnnnnnnnnnnnnnnnnnnnnnnnnnnnnnnnnnnnnnnnnnnnnnnnnnnnnnnnnnnnnnnnnnnnnnnnnnnnnnnnnnnnnnnnnnnnnnnnnnnnnnnnnnnnnnnnnnnnnnnnnnnnnnnnnnnnnnnnnnnnnnnnnnnnnnnnnnnnnnnnnnnnnnnnnnnnnnnnnnnnnnnnnnnnnnnnnnnnnnnnnnnnnnnnnnnnnnnnnnnnnnnnnnnnnnnnnnnnnnnnnnnnnnnnnnnnnnnnnnnnnnnnnnnnnnnnnnnnnnnnnnnnnnnnnnnnnnnnnnnnnnnnnnnnnnnnnnnnnnnnnnnnnnnnnnnnnnnnnnnnnnnnnnnnnnnnnnnnnnnnnnnnnnnnnnnnnnnnnnnnnnnnnnnnnnnnnnnnnnnnnnnnnnnnnnnnnnnnnnnnnnnnnnnnnnnnnnnnnnnnnnnnnnnnnnnnnnnnnnnnnnnnnnnnnnnnnnnnnnnnnnnnnnnnnnnnnnnnnnnnnnnnnnnnnnnnnnnnnnnnnnnnnnnnnnnnnnnnnnnnnnnnnnnnnnnnnnnnnnnnnnnnnnnnnnnnnnnnnnnnnnnnnnnnnnnnnnnnnnnnnnnnnnnnnnnnnnnnnnnnnnnnnnnnnnnnnnnnnnnnnnnnnnnnnnnnnnnnnnnnnnnnnnnnnnnnnnnnnnnnnnnnnnnnnnnnnnnnnnnnnnnnnnnnnnnnnnnnnnnnnnnnnnnnnnnnnnnnnnnnnnnnnnnnnnnnnnnnnnnnnnnnnnnnnnnnnnnnnnnnnnnnnnnnnnnnnnnnnnnnnnnnnnnnnnnnnnnnnnnnnnnnnnnnnnnnnnnnnnnnnnnnnnnnnnnnnnnnnnnnnnnnnnnnnnnnnnnnnnnnnnnnnnnnnnnnnnnnnnnnnnnnnnnnnnnnnnnnnnnnnnnnnnnnnnnnnnnnnnnnnnnnnnnnnnnnnnnnnnnnnnnnnnnnnnnnnnnnnnnnnnnnnnnnnnnnnnnnnnnnnnnnnnnnnnnnnnnnnnnnnnnnnnnnnnnnnnnnnnnnnnnnnnnnnnnnnnnnnnnnnnnnnnnnnnnnnnnnnnnnnnnnnnnnnnnnnnnnnnnnnnnnnnnnnnnnnnnnnnnnnnnnnnnnnnnnnnnnnnnnnnnnnnnnnnnnnnnnnnnnnnnnnnnnnnnnnnnnnnnnnnnnnnnnnnnnnnnnnnnnnnnnnnnnnnnnnnnnnnnnnnnnnnnnnnnnnnnnnnnnnnnnnnnnnnnnnnnnnnnnnnnnnnnnnnnnnnnnnnnnnnnnnnnnnnnnnnnnnnnnnnnnnnnnnnnnnnnnnnnnnnnnnnnnnnnnnnnnnnnnnnnnnnnnnnnnnnnnnnnnnnnnnnnnnnnnnnnnnnnnnnnnnnnnnnnnnnnnnnnnnnnnnnnnnnnnnnnnnnnnnnnnnnnnnnnnnnnnnnnnnnnnnnnnnnnnnnnnnnnnnnnnnnnnnnnnnnnnnnnnnnnnnnnnnnnnnnnnnnnnnnnnnnnnnnnnnnnnnnnnnnnnnnnnnnnnnnnnnnnnnnnnnnnnnnnnnnnnnnnnnnnnnnnnnnnnnnnnnnnnnnnnnnnnnnnnnnnnnnnnnnnnnnnnnnnnnnnnnnnnnnnnnnnnnnnnnnnnnnnnnnnnnnnnnnnnnnnnnnnnnnnnnnnnnnnnnnnnnnnnnnnnnnnnnnnnnnnnnnnnnnnnnnnnnnnnnnnnnnnnnnnnnnnnnnnnnnnnnnnnnnnnnnnnnnnnnnnnnnnnnnnnnnnnnnnnnnnnnnnnnnnnnnnnnnnnnnnnnnnnnnnnnnnnnnnnnnnnnnnnnnnnnnnnnnnnnnnnnnnnnnnnnnnnnnnnnnnnnnnnnnnnnnnnnnnnnnnnnnnnnnnnnnnnnnnnnnnnnnnnnnnnnnnnnnnnnnnnnnnnnnnnnnnnnnnnnnnnnnnnnnnnnnnnnnnnnnnnnnnnnnnnnnnnnnnnnnnnnnnnnnnnnnnnnnnnnnnnnnnnnnnnnnnnnnnnnnnnnnnnnnnnnnnnnnnnnnnnnnnnnnnnnnnnnnnnnnnnnnnnnnnnnnnnnnnnnnnnnnnnnnnnnnnnnnnnnnnnnnnnnnnnnnnnnnnnnnnnnnnnnnnnnnnnnnnnnnnnnnnnnnnnnnnnnnnnnnnnnnnnnnnnnnnnnnnnnnnnnnnnnnnnnnnnnnnnnnnnnnnnnnnnnnnnnnnnnnnnnnnnnnnnnnnnnnnnnnnnnnnnnnnnnnnnnnnnnnnnnnnnnnnnnnnnnnnnnnnnnnnnnnnnnnnnnnnnnnnnnnnnnnnnnnnnnnnnnnnnnnnnnnnnnnnnnnnnnnnnnnnnnnnnnnnnnnnnnnnnnnnnnnnnnnnnnnnnnnnnnnnnnnnnnnnnnnnnnnnnnnnnnnnnnnnnnnnnnnnnnnnnnnnnnnnnnnnnnnnnnnnnnnnnnnnnnnnnnnnnnnnnnnnnnnnnnnnnnnnnnnnnnnnnnnnnnnnnnnnnnnnnnnnnnnnnnnnnnnnnnnnnnnnnnnnnnnnnnnnnnnnnnnnnnnnnnnnnnnnnnnnnnnnnnnnnnnnnnnnnnnnnnnnnnnnnnnnnnnnnnnnnnnnnnnnnnnnnnnnnnnnnnnnnnnnnnnnnnnnnnnnnnnnnnnnnnnnnnnnnnnnnnnnnnnnnnnnnnnnnnnnnnnnnnnnnnnnnnnnnnnnnnnnnnnnnnnnnnnnnnnnnnnnnnnnnnnnnnnnnnnnnnnnnnnnnnnnnnnnnnnnnnnnnnnnnnnnnnnnnnnnnnnnnnnnnnnnnnnnnnnnnnnnnnnnnnnnnnnnnnnnnnnnnnnnnnnnnnnnnnnnnnnnnnnnnnnnnnnnnnnnnnnnnnnnnnnnnnnnnnnnnnnnnnnnnnnnnnnnnnnnnnnnnnnnnnnnnnnnnnnnnnnnnnnnnnnnnnnnnnnnnnnnnnnnnnnnnnnnnnnnnnnnnnnnnnnnnnnnnnnnnnnnnnnnnnnnnnnnnnnnnnnnnnnnnnnnnnnnnnnnnnnnnnnnnnnnnnnnnnnnnnnnnnnnnnnnnnnnnnnnnnnnnnnnnnnnnnnnnnnnnnnnnnnnnnnnnnnnnnnnnnnnnnnnnnnnnnnnnnnnnnnnnnnnnnnnnnnnnnnnnnnnnnnnnnnnnnnnnnnnnnnnnnnnnnnnnnnnnnnnnnnnnnnnnnnnnnnnnnnnnnnnnnnnnnnnnnnnnnnnnnnnnnnnnnnnnnnnnnnnnnnnnnnnnnnnnnnnnnnnnnnnnnnnnnnnnnnnnnnnnnnnnnnnnnnnnnnnnnnnnnnnnnnnnnnnnnnnnnnnnnnnnnnnnnnnnnnnnnnnnnnnnnnnnnnnnnnnnnnnnnnnnnnnnnnnnnnnnnnnnnnnnnnnnnnnnnnnnnnnnnnnnnnnnnnnnnnnnnnnnnnnnnnnnnnnnnnnnnnnnnnnnnnnnnnnnnnnnnnnnnnnnnnnnnnnnnnnnnnnnnnnnnnnnnnnnnnnnnnnnnnnnnnnnnnnnnnnnnnnnnnnnnnnnnnnnnnnnnnnnnnnnnnnnnnnnnnnnnnnnnnnnnnnnnnnnnnnnnnnnnnnnnnnnnnnnnnnnnnnnnnnnnnnnnnnnnnnnnnnnnnnnnnnnnnnnnnnnnnnnnnnnnnnnnnnnnnnnnnnnnnnnnnnnnnnnnnnnnnnnnnnnnnnnnnnnnnnnnnnnnnnnnnnnnnnnnnnnnnnnnnnnnnnnnnnnnnnnnnnnnnnnnnnnnnnnnnnnnnnnnnnnnnnnnnnnnnnnnnnnnnnnnnnnnnnnnnnnnnnnnnnnnnnnnnnnnnnnnnnnnnnnnnnnnnnnnnnnnnnnnnnnnnnnnnnnnnnnnnnnnnnnnnnnnnnnnnnnnnnnnnnnnnnnnnnnnnnnnnnnnnnnnnnnnnnnnnnnnnnnnnnnnnnnnnnnnnnnnnnnnnnnnnnnnnnnnnnnnnnnnnnnnnnnnnnnnnnnnnnnnnnnnnnnnnnnnnnnnnnnnnnnnnnnnnnnnnnnnnnnnnnnnnnnnnnnnnnnnnnnnnnnnnnnnnnnnnnnnnnnnnnnnnnnnnnnnnnnnnnnnnnnnnnnnnnnnnnnnnnnnnnnnnnnnnnnnnnnnnnnnnnnnnnnnnnnnnnnnnnnnnnnnnnnnnnnnnnnnnnnnnnnnnnnnnnnnnnnnnnnnnnnnnnnnnnnnnnnnnnnnnnnnnnnnnnnnnnnnnnnnnnnnnnnnnnnnnnnnnnnnnnnnnnnnnnnnnnnnnnnnnnnnnnnnnnnnnnnnnnnnnnnnnnnnnnnnnnnnnnnnnnnnnnnnnnnnnnnnnnnnnnnnnnnnnnnnnnnnnnnnnnnnnnnnnnnnnnnnnnnnnnnnnnnnnnnnnnnnnnnnnnnnnnnnnnnnnnnnnnnnnnnnnnnnnnnnnnnnnnnnnnnnnnnnnnnnnnnnnnnnnnnnnnnnnnnnnnnnnnnnnnnnnnnnnnnnnnnnnnnnnnnnnnnnnnnnnnnnnnnnnnnnnnnnnnnnnnnnnnnnnnnnnnnnnnnnnnnnnnnnnnnnnnnnnntggttttgtatctttggggacataatgaggaagggattatttcactcagggttccacaacaatcgtcatccttacctccagtgattctgagctcatcgtgaggcagagggagcctacacagagtgagattgctcacatattggcagatgacatatgtgtgtgtgtgcgtgtgtgtgtgtgtgtgtgtgtgtgagagagagagagagacagggtctcactagggagccttgattttcctagaactcactctgtagatgtgtgtgtgtgtgtgtgtgtgtgtgtgtgtgtgtgtgtgtgtatggaggagggggaagagttgagagagaggaggacattgatgtttattttcttttccttttccctctgtattaccctgcacctagtctaagggttgagctgtacatattgaaggcaggtcatcccacattaattaatctgaaaataccctcatgggcatacctagaggtgtgttgtaatatcttttaggcacctttcaactcagtcaggtaaacaggcaagattgatccagcacatgtaacaagaaggccttgcccatatagactgtacatgaaaagatctcctgtcattatggctgacaataatagtgaatggcagggcctctctattactccatgttcagaatgagcatcaaacagcaaaattaaaacaacaaggtgacaataaaacaaacaaatataaacaaacaacaactccctccaaacccttgcatgtaacaccttaaagcagacatgcaaagacttctcattaaaagtttctttttatataaattttttccatagatttctaaatcttgttcacttcagtatagaaagtgtcacttaataaggccccgttaaagagagtaaatctacatcaaacttgagctgattttccttagaataggagcttgtgaggaaaaaaattcctcaactcatttgagggcagcatacactcttttgagtcagaataaacacatgatttaccactaaagaatgtacttcttagtcctttgcgtccatgatgcttttctcggaaattctctagaaatcgtggcgtgcgatgttgtctctgctgccgttgaccggctttttctttatcatatttctccataggtgtttgaggggatcttgagaacaagcaagaggactgactgttgtcaagttaatataggatttagattactactttctttttgaggcagggtctcaccagggagccttgactttcctggaactcactctgtagaccgggctggcctttacatagagatccgcctatctctgcctcctgaatgctatgatgaaaggcatgtaccaccatgcccagccattagaattcctcctgatactctggtatcctttctgactgtaataatatcccctggcattgtagaaatttatttgtgtctggctacaaagtcagcattcatttgaaataaatctggcactgtgagtttaacttgactttatcaggagtaaatctggtattgggtcacgattttgtaatcagtctgttactgcatagtcttaggccatcaaatattaggctgagggagtggccctgagtgatggcagaggaaacatggcttaattcaagctgcatgtggagagaaaaacttctgagcttctcatcacttcattgccctctcagcttagggctaagtggaagctgctctaagtgtcattttcacaaagcaagtcagaattgctttttcttggcaccatgttgcaagtgcatataagtattcatttagaagaaacagtgcaattctcctcttagttgttcattgcagtgtagtaacttacacattacttatttttggagttctcatagaggaactttgagcctgagctcagtctcccaatacaaactattctcacatcacttgactttaaccaagaagactgttaaaggttaatgcagattcttcttagtgctcacttagttgaaaccatgaagagggcattgaaatagagtcacatttcttattatggtggtacaggagccagtttttattctagagtcttagagtcagcagggataccaaatatatgttagatttgctcttggcatttatcatgtacttagtacaaataattaaaaaaaaacaaaagtcagttttcatttgtacagtattgtcatatctgcataatattattattgctagatttggtgcaaacagccataatcatttttaacttaaaaacttttcttattaccagttggaacttcttctgggtatgtgcccaggagaggtattgctggatcttctggtagcatgacactattgcatatgccagcaagattttgatgaagggaccctggtatagctgtctcatatgaggctatgccagtgcctggcaaatacagaagtggatgctcacagtcatctataagatggaacacagggccccaatggagatgctagagaaagcacccaaggagctgaaggggtctgcgaccctataggtggaacaacaatatgaactaaccagtatccccagagcttgtgtctctagctgcatatgtagcagaagatggcctagtcatccatcactgggaagagaggccccttggtattgcaaactttacatgccccagtacaggggaatgccagggccaagaagtgggagtgggtaggtaggggagttgcggggcaggtatagggaagttttgggatagcatttgaaatttgaaatgtatataaagaaaatatctaataaaaacttttcaataaaatatttataacttctacttttttattcttttattcaagtgtacaccatatacaaagaaatagttcaatagaatttatcatttcaagtgaaaggaaaagaccttattggaacttctgggaggatttagagtttgtttcccaggagcttggtgaataagtagattgatatgtgattcatgcccaagatatttagagagctagaggatgtctggaggactgtggtttgggaaaccactgcagtcactgcagtcttgctagtatttcctgtagatcagggtgagaacgataataacattgtgtgcctttgatctgtcccagagaacagagcagaaggaagctggtaagctgataatgcccagagcttaagaagggttataagtgaacagctggaaaagggacagagtcaccggtatagagacccttgccattagaaatttttgtccgtggagtcagggagataatgcaggctcagaatgaaacaacaaattgatcaccaaagtagcaccactgaaaacctttgttcattcctgctcgaccaaggaaatgctagaatctgcttagcaaaattgtgtgctgagtggaagttgagcagtgttactgttggtcaataatggtatttccaaagtgccactgttttcttggtagttgttaaatctgcattagtgaaataaaattatgtagctaatttactagaaatgaaagaactttctcctggttcccatgttagatgctcattttcttcctgaagttttctttaggaactagactcaaggagcaactttggtcatgtttccctactcttcatagatttactcttgtattctcatcaaatgatactcctgttgttgttgtaaagttcagaagcattgagaggcctaatagtgctttattatgttttaaaaaacatgcttctatgtatgaatgcatgtatgttgacataaagttttgcagcctattttaataaacattcaactgctcttctaacccaccaccctccagaggtagtggaagagttattagaacactggggaagtagacctgtttagaaatatttccttgggggcaagtccaatctttgttgtcaggataccagcagtccagtcccatagcaaacaccacatatgaatcagcagttgcaatccagtcctcctggcaggcagacaccatgcatgagccagcagctatagttcaaccgtgaagaaaccacaaagttcacaaaccaggtgaaggcaagacgctgcaggaacctcgcaggaattccacgagaagttctttgctgagtttctgtctagagtcaccacaaacagagctcagcaatgcaatgtaaggcaaaccaatatatgtgtgtcattagcgaagaatggtgagacagaccaaagcaaaccaatgctcctctcccactgtctgtggatcatgtttacaatacttcattacacatctgctatagcaaaacttcatttgacataaccgactttccaaagaaaccagaagtttccacttaatatgtgtgtggtttggggtatgcatgtagagaccagagaacaacttgcaggccttgattctctccttctgctttgtgattcctgggactcagggtgtgtatgaagccctttgccttctgagctgctttgctcttccacatgtgctgttttaatgttgtcaggtcccctcttcagtcttataagaattttaaatcggataaaatgcaagttctcagattgaagcggggcgaatggttggtgctgtggcccatggtagagtgcttgcttataatacatatagtggcatataataccactatacaaacaaacaactcccccaaacaaacaacaaatcaaacactaacaacaaaacaaaacggccttgctcttatgtaaccttgaggaagttatatagcttttcaaagctgtaaatttcttctctgaaaactctagaaatgtatggattaaatgaattaatgtatatgaaatgtttggcatgttgaacaatgtttaggaatagcaggcctttctcttttgtgccgcgaccatcttcactctctttgtcctctttgtcttccttagagagagaaattaagggcattttagatgcttgttagcattacttacagagtaatttattaaactccatatttggatatataggtatttttgcattatccttttttttttctagtttgctttctgttgttgtgacaaaacactctgcccagatgcaacataggcgaggaaaacatttgtttgacttacaattctaggtcacagggcatcactgagggaagccaacgcagaaaccatggaggagcagtgattgttgactcatctggaggctcaggcttagctacttccttacacacttcaagcaggtctgcctgcccagagatggtgctgcttcggtgtgccaggccctctcacatcaattaatcaagagaatctcctgcagatatgcccacaggccaatttgatctggggcatttcttttcttttccttttctttttctttattagatgttttcttcatttacatttcaaatgctatcccctttcctagtttcctctctgaaaatcccctataccctctcccttcttcctgcttcccagcccacccactcccacttcctggccctggcattcccctgtactagggcatataatctttgcaaaaccaagggcctctcctcccattgatggttaactagttcatcctctgctacatatgcagctagaggcatgagctcaggagtactggttagttcatattgttgttcctcctatagggctgcagaccccaagattttgctgacaggaccctgatatagctgtctcctgtgaggctatgccagtgtctggcaaatacagaagtggttgctcaaagtcatctattggatgtaacacagggtccccaatgaaggagctagagatggtaaccaaggggcatctcttaattaagttttgtttgtcagatgactctgggctgtctcaagttaaaactaattgtagcattctgcatccatctcaagttgacagttaaaactgaaattaattagaacatcatctactatctatctatctatctatctatctatctatctatctatctatctatctatctatctatctatcccaggctgacctcaaacttacagagatccacttgcctctacctcctgggattaaagacatgttctaccatgtttatcatgttatcatgtttatcagctggttttctgctactaggaagacacttttttctgttatgaaaaatatataaaaatgtggactgttaaagtcacatttagtcaataggttatatcttgtagctgtcattttcttatatccacagatttggctagtggaatctctctctctctcaaattattttatgtatatgggtgtttggtctgcaagtgcactacatggaagtctagtgtctttggaggtcagaaaaaagtgttggatacccggagctttagttaaagatggttgtgatctgccatgtaggttctgggacttgaacctgtttcctctcaaagagcagtaagtactcttaaacactgagtgaactcttcatccctcccccccatatgaatatcttaaagatggttcttatatatgttcaccctatccttattcattgtattcattgggcattttaactttttttttgtattattttctaggtttgccccaccatgccaatgttcctgtcccatttttcccagtgatcctgggttttattgagtggagaaactaagatctcataactcgatctgtttatatgtaactgcaagcttttaaggctcatctcagctagtctttacatgatgagttttaccaggacaattgcttgcctttgctttccctttgttttatgttatttctctgccccgagatttaatgtcactgagaatatttggcagcagtttttatctaagtttgcaatgtgaaaaagttttaattgctctcaatcatggcctcagggatttttctgtgtgatgctttctttacttttgtactttcattttatttattaaataaagatgtatatttacccttaattgagaaatttcctcttgacaatggaccaagggtaaaggcgattcttattaagttgttactcatttggattatccacttatctggacttgatttgaaatgatgtttagtcttgatttgtaaagaggtctgtattgaatttttttgttgttgttgttcattgcctagaatgtcctttcaaaggctgacatagtgctgctatttggagtatgggaatccagctatgttatccaggaattaacttatatgagagtctggctgggtttttaaattttcttttctattaaaaagcttattttacatttctgtcatttaagatttgatggttctcttgaagataaagatgcatagtaatgctagctgtcctcattttttagtgactaaaaaacggtttatttatttatttatttaaaaaatttatttgcatttcatgtattatccccttacccagtttgctcccttcccaaaaacccccccatcccatccccctccccatgcttctatgagggtgttcctctacccacccacccatttccatctccctgcccttgattcccctacaccggggcatctatcaagccttcataggatcaaggacctctgttcccattgatacctgataagaccatcctctgttacatatgcagctagagccacgtgtactccttgattggtggcatagtccatgagagctctggaaggaatggttggttgatattgttgttcttcctatgacattacaaacccctttagctccttcagtcctttctctaactcctccattggagacacccccactcagtacagtggttggctgcgagcattccattttatatttctaaggttctggcagggcctctcaggagaaagctatatcaggctccttttagcaagcatttcttagcatctacaatagtgtgggaatttggtgactgtatcttggatgaatctccagatgggacagtatctggatggcctttccttcagtctctgttctgcactttgtctcaatatttgctcccttgagtattttgtcccccttctaagaagtactgaagtacccacactttggtcttccttgttcttgagcttcatgtagtctgtgaattgtatcttgggtattcagagattttgggctaatatccacttatcagtgagtgcatagcatgtgttttcttttgtgattgggttacctcactcttatgatattttctagctccacccatttgcctaagaatttcatgaattcattgtttttaatagatgagtagtactccatttgtaaatgtaccatattttctgtatccattcctctgttgagggacatctgggttctttctctcttcttgctatgataaataaggctgttatgaatatagtggaacatgtgtccttgttatatattggggaatctatcggtatatgcccagaagtggtataggtgggtcctcaggtagtacacgtgcaattttctgaggaaccgccagactgatttccaaagtggttgtaccagcttgcagtgccaccaacaatggaggagtgttcctctttctccacatccttgtcagcatctgagtttttgatcttagccattctgacaagtgcgaggtgaaatctcagggttgttttgatttccatttccctgatgaataaggatgttgaatatttctttaggtgcttctcagccctttgagttttctcagtttagaattctctgtttagctctgttccccagattttcatagggttatttgattcttgggagtgtaacttcttgacttctttgtatatattggatatcagtcctctattggatgtaggattggtaaagatcttttcccagtctgttggttgcccttttgtcccattgacagtgtcctgtgccttacagaagctttgcaattttatgaggtcccatttgttgattcttgatcttaaagcataagccattggtgttctgttcaggaaaatttcccctgtgtccatatgtttgagactttcccccacgttttcttctattagattaaatgttttatgtggaggttctttatctgcttggacttgagctttgtacagggagataagtggatcatttgcattgttctacatgttgaccaccagttgaaccagcaccatttgttgaaaatgttgtcttttttccactggatggttttaggtgctttgtcaaagatcaagtgaccataggtgtgtgggttaatttctgagtcttcaattctattccattgatctaccttcctgtcactgcaccaatgccatgcagttttttttaacacaattactctgtagtacagcttgaggtcagggacagcgattcccccagaagctcttttattgttgagaatacttttcactattctggggtttttgttattccaaatgaatttgccaattgctctttctaactctatgaagaactgagttgaaatcttgatgaggattgcattgactctgtagattatttttggcaagatggccacttttattaatcctgccaatccatgagtctgggagatctttccatcttctgaggtcttcttctatttctttcttcagagatttgaagttgttctcatacagatctttcacttgcttggttagagtcacaccaagaaactttatattttttgttgctattgtgaagggtgtcatttccttaatttctttctcagcctgtttatcctttgagtagaggtaggctactaatttgtttgagctaattatatatctaggcactttgttaaattgtttatcagctgtaggagttttctggtggagtttttggggtcactgaagtacaatatcatatagtctgaaaatagtgacattttgagttctttctttccaatttgtttcctttcacctccttttgttgtctaattgctctggctagaatgtcaagtactatattgaaaagatagggagagagagaatgaaggcagccttgatttacgtgggatcgattcaagtttctttccttttagcttgatgttggctgcgggttcacttgcttttactatgttaggtatgggccttaaattcctgatccttccaagatttttaacatgaagggatgttgatttttgtcaatttttttcagcatctaatgaaatgatcatgtgtttgtttctttgagtttgtttatgtagtggattacattgatggatttctgtatattgaatcatccctgcatccctgggatgaagcctatttgattgtggtgaatgattgttttgatgtgttcttggattcagtttgtaagaatttcattgagtatttttgcatcaatattcataagggaaattagtctgaagttctctttctttgttaggtttttgtgaggttttggtattaacataactgtggcttcatagaactaattgggcagtgttccttctgcttctattttgtggaatagtttgaagagtattgctattaggattttcttaaaagtctgatagaattctgcactaagtccatttggtcctgggctttgtttggtttgggaggcttttaatgactgcttctatttctttagtgattatgggactgtagagatggtttatctgatcctgatttatctttggtatttgatatctgtctaaaaaattgtccattttatccagattttccagttgtgttgcgtatatatactttgagtaggatctcatgatttttttaatttcccgtttctattgttttatgtcccttttcctttctgattttgttaattttgatactgcccctatgccctctgggtagtctggctaatggcttatctatcttgttgattttctcaaagaaccagctcctggtttggttgattctttgtataattctttttgtttcaacttggttgatttcactcctgagtttgattatttcttgctgtctacgcctcttgggtatatttacttctttttgttttagagctttcaggtgtgctttcaagctgctagagtatgctctctccattttctttttggaggcacccagagctatgagttttcctcttaggactgcttccattgtgtcctgtaagtttgggtatgttgtaccttcattttcattaaattctaaaaagtctttaatttctgtctttattttttcctcgaccaagttatcattgagtagagtgttgttcagcttccatgtgtatgtggggtttctgttgtttttgttgttattgaagaccagccttagtcagtggtgatctgataggatgcatgggattatttcaaccttcttatatatgttgaggtctgatttctgacaaattatatggccaattttggagaaagtaccatgaggtgctgagaagaaggtatattcttttgatttagaatgaaatgttctatagatatttgttaaatccatttggtccacaacttctgttggtttcactgtgtctctgtttagtttgtgtttccatgattcgtccattgatgagagctgtgtgttgaagtctcccactattattgtgtgaggtgcaatttgtgctttgagctttagtaaagtttcttttgtgaatgtaggtagcctttcatttggagcatagattttttttttttttttttttttttttttttgagacagggtttctctctgtagcccttgctgtcctggaactcactttgtagaccaggctgacctccaactcagaaatccacctgcctctgcctcccaagtgctgggattaaaggcatgtgccaccatgcctggctggagcatagatattcttaattgagagttcatcttggtacactttttcctttgatgattatgaagtgttctgccttattctttttcataacttttgtttgaaagtcgattttatccactattagaaaggctactccagtttgtttcttggtgtcacttgcttggaaaattattttccagtccattactctgaggtagtgtctgcctttgacactgaggtgcctttcctgtatgcagcaaaatgctgggtcctgtttacatatccagtctgttgttctatgtctttttattgggggaattgagtccattgatgttaagcgatattacagaatagtgattgttgtttcctgttatttttatgtttgtgtggttatcttcttttgggtttgttgaaagaagattactttcttggtttttctagggtatagtttccctcttcttgttggcattttccatctgttatcctttgtagggttggatttgtggaaagatactgtgtaaatttggttttgtcatgcaatatctttgtttattcatctatggtaattgagagttttgctgggtatagtagcctggattagcatttgtgttctctgagggtctgtataagatctgcccaggatcatcttgcttttataatctctattgagaagtctggtgtaattctgatatgtctgcctttatatgttactggacctttttactttactgcttttaatattctttctttctttgtgcatttgatgttttgactattatgtgacaggaggaaattcttttctggtccagtgcatttggagttctgtaggtttcttgtatgttcatgggcatctttttctttaggttaaggaagtttactttgttgaagatatttactggccctttacttgggaatcttcactctctactatacctattatctttaggtttgtcttcttcttgtatcctagatttcctggatgttttggtttaggcgctttttgctttttgcattttctttgattgttgtgtccaagttttcttttttttttttttttttgcactttttttttgcactttttttttccattttttattaggtatttagctcatttacatttccaatgctataccaaaagtcacccatacccacccacccccactcccctacccacccactccccctttttggccctggcgttcccctgtactggggcatacaaagtttacgtgtccaatgggcctctctttccagtgatggccgattaggccatcttttgttacatatgcagctagagtcaagagctccggggtactggttagttcataatgttgtttcacctatagggttgcagatccctttagctccttgggttctttctctagctcctccattgggagccctgtgatccatccattagctgactgtgagcatccacttctgtgtttgctaggccccggcatagtctcacaagagatagctacatctgggtcctttcaataaaatcttgnnnnnnnnnnnnnnnnnnnnnnnnnnnnnnnnnnnnnnnnnnnnnnnnnnnnnnnnnnnnnnnnnnnnnnnnnnnnnnnnnnnnnnnnnnnnnnnnnnnnnnnnnnnnnnnnnnnnnnnnnnnnnnnnnnnnnnnnnnnnnnnnnnnnnnnnnnnnnnnnnnnnnnnnnnnnnnnnnnnnnnnnnnnnnnnnnnnnnnnnnnnnnnnnnnnnnnnnnnnnnnnnnnnnnnntggtccatcctttcatctcagctccaaactttgtctctgtaactccttccatgggtgttttgttcccaattctaaggaggggcatagtgtccacacttcagtcttcattcttcttgagtttcatgtgtttagcaaattgtaccttatatcttgggtatcctaggtttggggctaatatccacttatcagtgagtacatattgtgtgagttcctttgtgaatgtgttacctcactcaggatgatgccctccaggtccatccatttggctaggaatttcataaattcattctttttaatagctgagtagtactccattgtgtagatgtaccacattttctgtatccattcctctgttgaggggcatctgggttctttccagcttctggctattataaataaggctgctatgaacatagtggagcatgtgtccttcttaccagttggggcatcttctggataaatgcccaggagaggtattgctggatcctccggtagtactatgtccaattttctgaggaaccgccagactgatttccagagtggttgtacaagcctgcaatcccaccaacaatggaggagtgttcctctttctccacatccacgccagcatctgctgtcacctgaatttttgatcttagccattctgactggtgtgaggtggaatctcagggttgttttgatttgcatttccctgatgattaaggatgttgaacattttttcaggtgcttctctgccattcggtattcctcaggtgagaattctttgttcagttctgagccccattttttaatggggttatttgattttctgaagtccaccttcttgagttctttatatatgttggatattagccccctatctgatttaggataggtaaagatcctttcccaatctgttggtggtctttttgtcttattgacggtgtcttttgccttgcagaaactttggagtttcattaggtcccatttgtcaattctcgatcttacagcacatgccattgctgttctgttcaggaatttttcccctgtgcccatatcttcaagggttttccccactttctcctctataagtttcagtgtctctggttttatgtgaagttctttgatccacttagatttgaccttagtacaaggagataagtatggatcgattcgcattcttctacacgataacaaccagttgtgccagcaccaattgttgaaaatgctgtctttcttccactggatggttttagctcccttgtcgaagatcaagtgaccataggtgtgtgggttcatttctgggtcttcaattctattccattggtctacttgtctgtttctataccagtaccatgcagtttttatcacaattgctgtgcagtaaagctttaggtcaggcatggtgattccaccagaggttcttttatccttgagaagagtttttgctatcctaggttttttgttattccagatgaatttgcaaattgctccttctaattcgttgaagaattgagttggaattttgatggggattgcattgaatctgtagattgcttttggcaagatagccatttttacaatgttgatcctgccaatccatgagcatgggagatctttccatcttctgagatcttctttaatttctttcttcagagatttgaagtttttatcatacagattctttcacctccttagttagagttacaccaagatattttatactatttgtgannnnnnnnnnnnnnnnnnnnaatttttagggtcacttatatatactatcatatcatctgcaaaaagtgatattttgacttccctctttcccaatttgtatcccccttgatctccttttgttgtcgaattgctctggctaatacttcaagtactatgttgaaaaggtagggagaaagtgggcagccttgtctagtccctgattttagtgggattgcttccagcttctctccatttattttgatgttggctactggtttgctgtagattgcttttatcatgtttaggtatgggccttgaattcctgatctttccaaaacttttatcatgaatgggtgttggatcttgtcaaatgctttttctgcatctaacgagatgatcatgtggtttttgtctttgagtttgtttatataatggattacattgatggattttcgtatattaaaccatccctgcattcctggaataaaacctacttggtcaggatgtatgattgctttaatatgttcttggattcggttagcaagaattttattgaggatttttgcatcgatattcataagagaaattggtctgaagttctctatctttgttgaatctttctgtggtttaggtatcagagtaatagtggcttcataaaatgagttgggtagagtaccttctacttctattttgtgaaatagtttgtgcagaactggaattagatcttctttgaaggtctgatagaactctgcactaaacccgtctggtcctgggctttttttggctgggagactattaataactgcttctgtttctttaggtgatatgggactgtttagatggtcaacttgatcctgactcaactttagtacctggtatctgtccagaaatttgtccatttcgtccaggttttccagttttgttgagtatagccttttgtagaaggatctgatggtgttttggatttcttcaggatctgttgttatgtctcccttttcatttctgattttgttaattaggattttgtccctttgccctttagtaagtctagctaagggtttatctatcttgttgattttctcaaagaaccaactcctcgtttggttaattctttgaatagttcttcttgtttccacttggttgatttcacccctgagtttgaattatttcctgccgtctactcctcttgggtgaatttgcttcctttttttctagggcttttagatgttttgtcaagctgctagtatgtgctctctcccgtttcttcttggaggcactcagagctatgagtttccctcttagaaatgctttcattgtgtcccataggtttgggtacgttgtggcttcattttcattaaactctaaaaagtctttaatttctttctttattccttccttgaccaaggtatcattgagaagagtgttgttcagtttccacgtgaatgttggctttccattatttatgttgttattgaagatcagtcttaggccatggtggtctgataggatacatgggacaatttcaatatttttgtatctgttgaggcctgttttgtgaccaattatatggtcaattttggagaaggtcccgtgaggtgctgagaagaaggtatatccttttgttttaggataaaatgttctgtagatatctgttaggtccatttgtttcataacttctgttagtttcactgtgtccctgtttagtttctgtttccacgatctgtcccttgatgaaagtggtgtgttgaagtctcccactattattgtgtgaggtgcaatgtgtgctttgagctttactaaaatgtctttaatgaatgtggctgcccttggatttggagcgtagatattcagaattgagagttcctcttggaggattttacctttgatgagtatgaagtgtccctccttgtcttttttgataactttgggttggaagtcgattttatccgatattagaatggctactccagcttgtttcttcagaccatttgcttggaaaattgttttccagcctttcactctgaggtagtgtctgtctttttccctgagatgggtttcctgtaagcagcagaatgttgggtcctgtttgtgtagccagtctgttagtctatgtctttttattggggaattgagtccattaatattaagagatattaaggaaaagtaattgttgtttccttttgtttttgttgttagagttggcattctgttcttgtggctgtcttctttttggtttgttgaatgattactttcttggttgttctagggcgtgatttccatccttgtattgcttcttttctgttattatcctttgaagggctggattcgtggaaagatattgtgtgaatttgtttttgtcgtggaatactttggtttctccatctatggtaattgagagtttggccgggtatagtagcctgggctggcatttgtgttctcttagtgtctgtataacatctgtccaggctcttctggctttcatagtctctggtgaaaagtctggtgtaattctgataggccttcctttatatgttacttgacctttctcccttactgcttttaatattctatctttatttagtgcatttgttgttctgattattatgtgtcgggaggaatttcttttctggtccagtctatttggagttctgtaggcttcttgtatgatcatgggcatctctttctttatgtttgggaagttttcttcaattattttgttgaagatgtttgctggtcctttgagttgaaaatcttcattctcatccactcctattatgcgtaggtttggtcttctcattgtgtcctggatttcctggatgttttgagttaggatccttttgcattttgtattttctttgactgttgtgtcgatgttctctatggaatcttctgcacctgagattctctcttccatttcttgtattctgttgctgatgctggcatctatggttccagatctctttcctagggtttctatctccagcattgcctcgctttgggttttctttactgtaactctttagcagtgctctcctgtaattctttaagtgacttatgaaagtccttcttgatgtcctctatcatcatcatgaaaaatgcttttaaatctgggtctagattttcggttgtgttggggtgcccaggactaggtctggtgggagtgctgcgttctgatgatggtgagtggtcttgatttctgttagtaggattcttacgtttgcctttcgccatctggtaatctctgaagctagctgttatagttgtctctgttaagagcttgtacttcaggtgactctgttagcctctataagcagacctgggagggtagcactctccttggtttcagtgggtagagtattttctgcaggaaagctctcttctttcagggaaggtacccagatatctggtgttcgaactggactcctggcagaagttgtgttccactcactagaggtcttaggatcccgtggaaaatcctgtgtgggcccttgcgggtgtcaggcgactctgctggcaaggaagccctgggctggagtggagaggaaggggcttttgtcccgggtcaggcccgggcagtctgcttccctatgtacagcagtctcaggttccgcgcgattggattggggccggcgctgtgctccactcaccagaggtgttaggatcccgtggggaatcctgtgtgggcccttgcgggtgtcaggcaactccgctggccaggaagtcctgggctggagtggagcggaagggcgtgtccaagttttctgtggtatcttctgcacctgagattgtctcttctatctcttgtattctgttggtgatgcttgcatctatgactcctgatctctttcctaggttttctatctccaggggttgtctccttttgtgattctttattgtttttatttccatttttgtatcctgcgtggttttgttcatttcctccaactgtctggttgtgttttcctgtaattctttaagggatttttgtgtttcctctttaagggcttcttcctgtttacctgtgttttcttgtatttctttaagggagttatttatgtccttcttaaaaccatcatcatgagatgtgactttaaatcagattcttgcttttctggtgtgttggggtatccagggcttgctgtggtgggtgaactgggttctgatgataccaagtagccttggtttctattgcttatgttcttacccttgccttttgtcatctggttatctctggtgttatctctggagtagcatgcacagttaattgacaagcagtaagtttctattgtctacccagtatgatcatttattgttggaaaaacacatgtacataaaacaacagtaaaacaaaaagtgcctttagttaccaattagatatagttaaaaaaaatgttaattctgtgataaaggcagggtgcttttgttacaccatccagtccatctttttgtttgcattaggagcatatacctgttagcatgatgtttcccatgttttaagtcctttgcaattaaccatcaattttgctgctgctcctgatcgaaattggtgatctaatttcaaaggttgttgggagagcaaaccacattaatcatatttctggtctttaagccaggtctaaattgttggcattcctgatcaaagttttgttccaaataatatataaattgttggtgctcatgaaaatactttgtaaattattgctcacagtcatgaatgtcaacagcttaatagctgcttataggttcatggtaagaagtggtatgaccttggctgtgaacacttagctgttcacagcaccattttttctcatagtaattaaaatgggacaataaaatttattacagtgctaatcaaagcaaccctgagattccacctcacaccagtcagaatggctaagatcaaaaattcaggtgacagcagatgctggcaaggatgtggagaaagaggaacactcctccattgttggtggggttgcaagcttgtacaaccactctggaaatcagtctggcagttcctcagaaaattggacatagtactaccggacgatccagcaatacctctcctaggcatatatccagaagatgttccaactggtaagaaggacacatgctctactatgttcatagaagccttatttataatagccagaagttgggaagaacccagatgtccctcaacagaggaatggatacagaaaatgtggtacatttacacaatggagtactactcagctattaaaaagaatgaatttatgaaattcctaggcaaatggatggacctggagggcatcatcctgagtgaggtaacccaatcataaaagaactcacacaatatgtactcactgataagtggatattagcccagaaacttagaatactcaagatacaagatacaatctgcaaaacatatgaaactgaagaagaacgaagaccaaagtgtagacactttgccccttcttagaattaggaacaaaacacccatggaaggagttatagagacaaagtttggagctgagatgaaaggatggaccatctagagactgccatacccgggaatccatcccataatcagcctccaaacgctgacaccattgcatacactagcaagattttgctgaaaggacccagatatagctgtctcttgtgaggctatgctggggcctagcaaacacagaagtggatgctcacagtcagctattggatggattacagggcccccaatggaggagctagagaaagtacccacggagctaaaggacaacctataggtggaacaacaatatgaactaactagtacacccccccgcaccgagctcgtgtttctagctgcatatgtatcagaagatggcctagtcggccatcattggaaagagagtcccatcggtcttgcaaactttatatgcctcagtacaggggaatgccagggccaagaagtgggagttggggggtgggagaggggttggggggtatgggggtgcttttgggatagcatttgaaatgtaaatgaagaaaatacctaattaaaaaatatctgagagtcaaccacaagaaaaaaaaactttatttcatttagttactgtgaagcataaatgagatgacatatgaagcatgagtaaaatttctttaaatatactctggccatagtatgtttttatgattattttatttatttacatttcaaatgttagcccctctcccagtttcctctccacaaactccctatcttatccttctatgaaggaaccctgcactcctacctcaccaccctagcattcccctacattaggacatcgagtctctacagggccaagggcctcctgtccaattgctacacttgcagctggagctgtgtgcatccctttgtgtgtattctttggttggtggtttagtccttggtttagttgatattgttgctcttcctgtgtggttgcaatcccccttgagctcctctgtcctttccctaactactctatttgggtctccgtgctcagtctgtggtctttatttatttatttacatcccagtcacagcttcccctcccgattcatccctcactgagttcctttacccccttcctttttcctctgagagggtgagaccccctcttcaatatctgctaccccctagttcatcaattctctgccagattaggtgtatcctgtcccagtggggccagacagatcagccatgaagactgagcttcctgtctgctacatgtgtgcctatgggcctcatttcagcccatgtatgttctttggttggtggctcagattctgagagctcccaggggtccaggtttgttgactctgttggtcttcctgtagagttcctatgtacttctggagttcccatcagtccttctctcaacttttccataggtttccctgacctccatctagtgttttgcgattgagtatgtgcttctgtttctgtccactggtgtgtatagccactcagaggacagttatgctaggctctggtcttcgagcatcacagaacatcatttataatgtcagggattagtgtttgtccatgggatgaactggttattggtttggccatactgtttttataactctaacttgtctctgattttgacctatggagtccttgaattaagtaatcttaggttggcttgtaggtttgttgcattggaactctgctgaaggaaggaagagagaaatagacatatggatatgactgtagaaagacaaaaactttcaatggaagatatgattaagggaaaagtttcaaacaataggcttcccacaatgttcataagaatgttgagcaaaaaagccacaaggttgtgaaattctggtccttttggctcttcatgtctcacaaaagaggcatgacaagggaagtgctcacaaaccaaagagcaaaaaccaggaaaaatattttagaaaactatctcctgagttcttttctgaatcaatctctgtaaagcagaaagtatctaagaatagagagtgacttctgctgttcagatgtgtgcacccagcctgggagcttaccatccaagcacacgttcagagttcctgctgacgccttctgactttgagtgttattttatctttggaactcacctttcttatctgtatggtgagaactttggtctaaaatcttttcatatctaatattgcttggtgtactttgactttatttcatttttttgctgtactttttgatgtatggaatttgcatagcatgttagaatttattattattgttttacatcttatcctgaaaaagtgataagaagtatagtgtaacaaattttcagtacccagtttcataagttataacttaccatattttattcataattctgcctgttatggctcttccacagaatgtttacaagtgaaatttagaactcatgtaatttcctttccaattatcttagaatatgtttaataggaaatgaccttatttaaatcctcattaaggctggcagagtggttcagcctgacaacctgagttctatccctgggatccacatggtggcaggagagagccaagacatctggcttccacagaatcactgtggccagcatggcaagttctccagctctctctctgtctctgtctctccttatctcactgactctgtctctctctttctctcacatacacacacacaaatttaaagcataaatatgcaaaccattattatacatgaataaaaatagtaattaatgttattaagcatgcaattgacattcaaatttctgtctctcaaatttgaagtccacattccttctttatctcacagttcctttccaatctttctttttcattatgattttcataatttttctattgtcctgttattattattgtttttctgtggtgtctctatttttaatagtacattgacaaattatataagattatccagacttttatttgagttttctttttcttaagattatttaatagaaaatgatgattgtttttctaggtatcacgtaaggaccttttttttgtaaagttggaagttactaatgattgcctatgtttattatcaataatgtttgactctatctattaattcagtaggaattgcatagctgtgggttttaactctgctatgttttctttattgttggtaaacttttacaaaacaaatttttctggatgctggagaaatgtctaagctggcaaaatgcttgcaatgcaaaaaatgagaacacaaatttgaatcgtcagaacccacataaagctctgggtaaggcagcttgtgttggcaactccaatgctgggtggtcagggtgtatagagatagatggatccctggtgctatgaaaccacccagcctaaccaatcagttagttccctgtacagctagggaacttggtttttttttgtttgtttgttttgttttgttttttgttgcttttaaataaagtttaagtgctttagtctgccttcatctccagcctccaggtatatttatataacacacacacaaacacacaaacaccctgggtatagtttacttagtgaaggttaggtagatgcaacatttttcccttatgaaactttacaatatgaatttatttcttagtatataccagtagctttgggtgattaagaattcagtatgagcccacaaaatttaatagacttaatttgtttaaatcagatactaggaatacttgtattctctattcttggacatttccaacaagaaaaaaaacaaaaatgtgagttaagtaagatattaaaataccaagtctattcatattttaagttagtgtgtgtgtgtgtgtgtgtgtgtgtgtgtgtgtatgtggtaggactacatgttatagcatgcatgtggagggcagagggaggacagagggcaattttggagagtcaattctggcctttcacctgttgagtttctcttatgttttctgtgtctgtgtgcagtctattccaggctagcaggcctgtaagttttctgcctgctctctgcctcctctctctgcctcccacatcacaggaggaatactgagactacaaatgcatgccagcatagcaggcttgagttctaggactagaacgtaagtcatcagactatcatgaaaagtacctggagagctgtcttcagtccctatcatcattttaattcttcacactattaaaaaaaaaaaacacaaaaaaaaacaaggaaaaaaaacagctgagaaaagcaaagtccagatatttgtatacatttgacatagtctattatccatcacaaaatattttattacttttggctctttcagggaatggtctattagtagattttctgcatgttttagaatattagcagtagctatctaattggattaacacatttatattttatctttacattcactactggcactggtgtactcatctttaaaatgtttctcttccttgttcttaagttgctgccactggtctgtgtcttggaaggaatcagatagcagacagtgaagatggggataatgtataaagtagcaacaacagagggccagaggaactaaagagccgtccatgtttagaggacaactatagtgaatgtaaattgttttagggtgtggcaaaagatacagaatggtgagtgactccatcaatttcaacagaaagaactccatcataacccaatgtgtcacatcaagaaatattattattttaagaattttagtattaaaaaatcttgatcagatttttggaagttttttttgtatcacataaagagtaaactgaggcaggtaagctgtaaataagggcataagaacttatatagatgtgggagatatctgacaggtcaaattatcaaccaggaattattgatcagttggacataaacacagagtgaaagacaagagtttagggtaactcacgtttcttgattgtgtatatgttgagatgtgttttccattaaataaggtagtgactataggaaaagaacgttggttaatggtgtgtgagtttgactgaactggtatatcatttctgtttagggcatcaacagcttgtaatattttggacttttggatggagatgccaatgaaaacataagtacacataaacacatttggatttaagaacacagatttgagtccacatctcagctctgctacaatacttcttgtgctttattttgttctctttccttttattaccatcaggctaaagccccaccctgaagctctttgttacttagaatccgcaagcttcccttaggctgatttctgtcaggagagctgtcctgagaattgaggcgctctaggtctggagcaggtgtatataagcattgggtgccactgagatgctgagcctgatgcagcacagcactggaatgggttctgggggcagcagctttcagttccattcttctggtgtgtgtgcagaacctctcatcaatttgtcaaagggatttgggattccccaaatgataagcgttggtagagagagtattgaattctgtaaggtgtcacagagttacagagagtgtgagtgcctgttactgctgggatttaaggtttctggtgaaggagagaagggcaagggcaaggcactattcagaagaaacgtaaagtaagggaaaccaggagcatacttttaggatctcaactgcaaggtttactatgtagtcagtgttcacagaagccacaagatggcgagcttgtccctcatagtgaaagtgagtggaagggcaagggacagaaggagagggagagggagaggnnnnnnnnnnnnnnnnnnnnatagattttttttctgttaactttggattataagcacagttgtttttttttaaacaaccccaaccatttttatttcatacttagacagttactgatttttcaacagataattcattttcacattactaacagataaatctaattgtaaacacagttctcaaaattgttggtattattaatatcatataaatagttaagtattaggtgagaagacagaatgttttttttgcttacaaacacatgcatatatacacacatgcatatttatttatttatttatttatttatttagagacagggtctccctatgtagccttggctattcaggaactcacttgtagaccaggatagcctcaaacttacagagattggcctacctctttgtctcccaaatgctggtattaaagatgtgcgctaccatacccagttttactatacaatattattattaccacattcttctgtctactgagcagtgttccaactgtaaaaagttttccattttaatggatgttagacaacttatttttaatacttgagatttctagtctcaatactttgacatacctcaacgtatcttttcttatgatattataaatattatatggaagaatgtaagctaatgtattcttagtgtgttgactaatatgtatatattgattaatgtacatttaatgctcaatataaaannnnnnnnnnnnnnnnnnnnnnnnnnnnnnnnnnnnnnnnnnnnnnnnnnnnnnnnnnnnnnnnnnnnnnnnnnnnnnnnnnnnnnnnnnnnnnnnnnnnnnnnnnnnnnnnnnnnnnnnnnnnnnnnnnnnnnnnnnnnnnnnnnnnnnnnnnnnnnnnnnnnnnnnnnnnnnnnnnnnnnnnnnnnnnnnnnnnnnnnnnnnnnnnnnnnnnnnnnnnnnnnnnnnnnnnnnnnnnnnnnnnnnnnnnnnnnnnnnnnnnnnnnnnnnnnnnnnnnnnnnnnnnnnnnnnnnnnnnnnnnnnnnnnnnnnnnnnnnnnnnnnnnnnnnnnnnnnnnnnnnnnnnnnnnnnnnnnnnnnnnnnnnnnnnnnnnnnnnnnnnnnnnnnnnnnnnnnnnnnnnnnnnnnnnnnnnnnnnnnnnnnnnnnnnnnnnnnnnnnnnnnnnnnnnnnnnnnnnnnnnnnnnnnnnnnnnnnnnnnnnnnnnnnnnnnnnnnnnnnnnnnnnnnnnnnnnnnnnnnnnnnnnnnnnnnnnnnnnnnnnnnnnnnnnnnnnnnnnnnnnnnnnnnnnnnnnnnnnnnnnnnnnnnnnnnnnnnnnnnnnnnnnnnnnnnnnnnnnnnnnnnnnnnnnnnnnnnnnnnnnnnnnnnnnnnnnnnnnnnnnnnnnnnnnnnnnnnnnnnnnnnnnnnnnnnnnnnnnnnnnnnnnnnnnnnnnnnnnnnnnnnnnnnnnnnnnnnnnnnnnnnnnnnnnnnnnnnnnnnnnnnnnnnnnnnnnnnttgtctataaataaatgataattgaaattagatgataggtttattacaaatttgctctctttttgtttcaaaatttgaataataaaacacaaggagacacagggcacatttttctgtcatcagtgataagggatgtcaaccaagtctgttggtacacactcataatcccagtattcatgggagagttgaggcaggaaggtctagagttcaaggttgggctatagatccagaaaaacaaacaagcaaagagaaaaatatctttaaaattttaattattttaataatatctttatataacttcatgtctcatatgtggatttaaaattttttattcatatgaggattttatttctaatagagactatttttggtagcaaacatgtctgggtagattaactgttgattggctcatataaacacatctttgcttctttgttcaccttatagattaattatgattatagattaattatgataaaaaatgattgtttttgagtaacaagtatttattcttctactaaatgtcaagtatttattcttctactaaatgtcatcaaacatgacaatagaatctgaggatatagcagtcagtcagagtgaaaatatccatacaggtcacatttcagcatggaggggacaactcatcaatgaaccagtgtactacccatctttgaggataaatgctataaactcaaatagcataaagggaaagaaaaatgtgatgtaggctgatttctataaatggacattaagggaggtctttttgctaaggagatattccatcagtggactggagcaagtgagggactgaaacaggggtgctccgcagtgaagcaactgccccaggagcacctttctacatatttatgaagcagagcatacctatgacagcaaagctctccactttctcggtaagaaatgggatttggagttggaaccccacagctgataaaacctttaggattaaacaataagcactaagacagaataaaaaaggaggacaaaagatccctcatgttctcatgatttttgttttcccttcctaacaaaacccaacagattgggaaaaggtctttaccagtctggtacatctacatctggtagagggctaacatccaatatatacaaggaactcaagaaggtggactcctgagaataaaataaccctattaaaaatggggtacagggctaaacaaagaattctcaactgaggaacgtagaatggctgagaagcacctagagaaatgttcaacatcctcaatcatcagggaaatgtaaatcaaaacaaccctgagattccatttgaaatgtaaataaagaaaatatccaataaaaaaaatcagaaagaaaattaaataaaaaggcagcacctaaaatgacactggcaagttgtgaaattgttttatatatgactattgctttttttctcccttcaaaaataaagtgactaccgtattcccatctgtaagtaagtccttctatttttcttttctttccagtgatagtttttcttttaagagagggtctagcaatgtagttcaggctagcctcaatctcttgctcctccgttctcaatttcctgagggctagaattgcatacatactgcaccaccattcctaaaatatgtccagctttaaaattcatcgcttgtaacttgtttgcttagttgagaaatccacaaacctaatctaggtcaatacattttgcttcacttttgtactgtcacatagaagaagagtgggtcgtgtctagtgagggcttggaataagtttaatcagtgatgaggcggaggcctaaggagagagagtgaaccccactgcagggggggggggcttttactcaacttgctctgcttccatgagagaatatgggctaacattgaatatatttctgactcccccccccccccaaccttttttcttttttttcaagataaggtttctctgtgtaggtctggctgtcctggaactctgtagaccaggctggccttgaactcagatccacctgcctttgcctctcaagtgctgggattaaaggggcgcactaccatgcctgtcttatttttctgacttttaaagaaaagccagaaattatgtcttatgtgctattttttattttttaaaaattgttgccaactaaataaaatcatttcaaattattctaaaggccaaacaaaacactcctgagggcagaatgaggtcagcaactcagaaggcttttgcttaccataatatatggttaagtcttactgcttccacccagggccacacagataacagggagagtgctgcaggtgttttgaggtgaatggttttagcacactgtcacacccatgtgggactgaatgcttgttcttcttgttgcaggatatggccagacagggcccatgtctcacagagcaggttatgatgctattgcttctgctatgtctggtctaatgcacatcacaggacctgaggtaggtatccttagattattcttatttatttctcatattttccataatttgtctcaccaagttaagctagaattaattttagaaagaaaccagggaaagagaatgactttttaaaacattaattatgttatttatttacattctagcccccactttcagtcccccctcccacagttcctcattttattcctcctccaccttgcctccaagagggtgcttccccctcactagaccaacccctctcctgaggcctcaagtttcctgagaattaagtgcatctcccactgaggccagaccaggcagacctctgctagatatgtgccatggacctcaaaccagccggtgtatgcctcctgattggtggctcatctctgggagctccctggggcctgggttagttgagactgctggtcttcctatggggtcactctccattacagcttcttcaatccttcccctaattcaaccattgggtccctgacttcagtccaatggttgggtgtaagtatctgcttcagtcttagtcagctgtaggtaggacttctcagaggacagccatgccaggctcctctctgtaagcactccatagcatcagtaattgtgtcaggccttggtgtctctcctctatgagatggacccaaaggtacacaggtcattgggccaccatgccttcagttgattctccatttttgttccagcagttcttacacaggaacatttgtgggtcagaagttttgactgtgagttagtaacctgtccctccacttgaggccctgtctgtctactggaggttggcttttccagttccctttccctaatgttgagcattttagctaagatcaccccattgaatcctaagggtctctcactgcctgggtctctgatactttctagagggtcccttacctccctcctctcgaggctgcttgtttccattcattttcttggccctttggatttctctcctgccttcccatgtttaatcctgttccccttttcccctccacctccctgctcacaccaaggtcattcccttcttctgcctccagtgattatttccttcccccttctaagtggattgaagtctcctcatttgggcctttctgcttatttcattttctagttccattcatttgcctgaaaaattcatgatgtcctcatttttaatgtaaatgaaccacattttctgtatctattcttctgttgagggacatatgggttgtttccagcttctggatattacaaataaggctgctataaacatggtggaacatgtgtccttgtagtatggtggaacatcttttgggtacatgcccaaagcaattctcaacaataaaagaacttctagggggaatcaccattcctcacctcaagctgtacacatagctgggttttcaggtaaaactatttgtaattttctaaggaactgccagattgatttctagaatggttgtaccagtttgcaatcccacaatgaaggagtgctcctctttctctacatctttgccagcatgggctgtcacctgagtttttgatcttagccattccaattggtgtgtggtagaatctaagggtctgttttgatttgcatttcactaatcactaaggactttgaacatttctttaagggcttcttgtccatttgaaattccttggttttgaattctctgtttagctctgtaccccattttagaattagattatttggtttttttggaggttaacttcttgagttctttgtatttttgtccataagtttatttctgggtcttcaattcttttttttttcccttccttccttccttccttccttccttccttccttccttccttccttccttccttcctttctttctttctttctttctttctttctttctttctttctttctttctttctttctttcttgtgtttgttctcaagacagggtttctctgtatagccttggctatcctggaactcacgctgtagaccaggctggcctcaaactcagaaatctgcctgcctttacctcccaagtgctgggattaaaggcatgtgctaccactgctcggcctgggtcttcaattctattccattgatcagcctgtctgtctctgtaccaaaaccatgcagtttttatcactattgctctgtgtacagcttgaggtcaggaatggtgattccccctagaagttcttttattgttgagaattgttttggtgattctgggtttttgtttttccatatgaagttgataattgctatttccatgtctgtgaagaattgtgttggaattttgatggggattacattgaatatgtagattgcttttggtaagatatccattttcactttgttaatcttaccatttcgtgagtgtgggagatctttccaccttcttaggttttcttcagtttctttttttcaggcatttgaagttcttgttgtatagatctttcacttgcttggtaagagcttcactaagatattttatactatttgtggctattgttaagggtgttgtttatttcctatttttttctcagcctgtgtatcatttatataaaggaaggctactgatttgcttcagataattttatatcttgacactttgttgaagatgtttatcagctctagtagttctctggtggaattttgggagtcacttttatatatactatcatattatatgcaaatagtgatactttgacttcttcctttccaatttgtatccccttgatatccttttgttgtctaattgctctagctagaacttcaagtggtatactgagtagatatggggagagtgggcatccttgtcttgtcccggattttagtgagattgcttctagtttctctccatttaatttgatgttgtctattggtttgctatatatactgatttttaccatgtttaggtgtgtgccatgaattattgatctctacaggacttttaatatgaaggggtgttgatgatcatgatttttgtttttccccctcgagtttgtttatgtagtgtattacactgatggattttcatccctgtatccctaggatgaagcctacttgatcatggtgaatgatggtctcaatgtattcttggatttggtttgtgagaattttattgagtacttttgcatttatattaataagtgagattgttctgaagttctctttctttgttggttctttgtgtagtttaggtatcagagtaactgtggtttcatagaatgaattaggtagtgttcctgctttttctattttgtggactagtttaagaagtattagcttttctttgaatctggcggaatactgcactaacttcatctggccctgtgcttattttggatggcaggtttttgatgaatatttctatttccttaggggttatagaccatttaaatagtttgcctgatctttatttaactttggtacatggtttctgtctaaagaatcatccatttcctttagattttccagttttatagagtgtagacttttgtagtaggttctgatgatattttgaatttcctcaggttctgttgttattacctctcctcatttctgattttgttaatttggatactgttcttgttctctttagttggctagggatttatctatcttgttgattgtctcaaagaagcagctcttggtttggttgaattgttgtatcattctttttgtttctaactggttgattttagccccgagtttgactattttctgtgtagtctactcctcttaggtgtgtttgcttctttcttttctaaggctttcaggagtaatgttaagttgcttgtatgggatctctccaatttctttatgaagacacttagtgctattgaatttcctcttatcactgctttcattgtgtcccataagtttggatatgatgtgtatttattttcattgaactctataaactctgtggtttctttctttatgtcttccctgaccaagttatcattgagcagaaagttgttcaatttccatgagtatatgggctttctgttgtttttcttgttattgaagaaacaatagccttagtccaaggtggtgtggtagaatgcatgggattattccaatgttcttgtatctgtttatgcttgttttatgtctgattatatggtcaattttggagaaggttccatgaatactgagaagatggtatattctcttgttttggggtgagatgttctgtacatatctgttaaatccatttggttcataatttctgttagtttcattgtgtctctgtttagtatctggtttctactacctgtctgttggtgagagtggggtcttgaagtctgccactattattgtgtgaggttcaatgtgtgttttgagctttagtaaagtttcttttatgaatgtgggtgcccttgcatttgaagcatagatgttcagaactgagacttccttttggtggatttttcctttgatgaatatgaaatgttctttatttcatttaataatttttggttaaagtttattttattgaatattagaaaggcaactccagcttgtttcttgggactatttgctaggaacacttttttccagccttttactctgaggtagtatctgtctttgtcactaaggtgtgtttcgttatgcaccaaaatgctggatcctggctccatatccaatctgttagcctgtgtctttttattgaggaattgaatcaattgatgttgagagatgttaaagacacatgattgttactttctgtttgtttttgtttttgttttttgttgttgcttgagatggtattatgaatgaatgactctcttcttttgggttgcgaaatgtttagtttcttgtgttttcttggatgtagttaccctccttgtgttggagatttctttccagtatcttttatatggctggattagtagaaagatactatttaaatttgtttttttttcatgggatatcttgtgttttttaatttatggtgactgagaattttgctaagtatattattctggactgacattattcttctcttagcatctggatgacatctgtgcagaatgttttagagttttaaagtctctgttaaaaaactggtgtagttctgatagatctgcctttatatgttacttggcctttttttttcttacatcttttaatattctttctttgttctgttcatttagtgttttgattattatatgtcaagaggattttcttttctggtccaatgtgtttggtattttgtaggcttcttgtacatttatggccatctatttctttaggttagggaagctttcttctatgactttgttgaagatattttctggccctctgaacaggattcttcatcttcttttattcgtattattcttaggtttgatcttttaattgtgccttgaattcctggatattttgggttaggagctttttatattttgtattttctttgaatcatgtgtcagtattttctatggtatcttctaagcctgagattctctcttttatctcttttactctgttggtaatacttgcatctgtagctcctgatatctttcctaagttgtctatcttcagtgttacctccttttgtattttcttttatttctgtttttaattcttggaccattttgtttaattcctttacccatttaattgtattttcctgtatttctttaatggatttatttgtttcctctttaagaacttcttcctgtttgtcttttcccatatttctttaagggagttctccatattatctttaaaggcctctatcgatttcattagatgggattttaggttattatcttgctttttacgtgtgttagggtatccagggcttgtggtatccttggaggcaggtagagctctgtgacatgggttaaagctggtctccttgggggtaggcagtgctgtctctagttagggtgggtctcttgtgtctctggttagagcaggcctcctgtttccctggttactgtggacttcctgggaggttttcaggctgtgtccttgattatagcagaccctcttcaaggcggcaggcaacagggtgtgggagggtatcaaggctgctgatctggtctggttgggaaagtagacttgaaggaaagtggagctggtaagggggttccatgtcagctggactctttatgtttggttattgcaaacctactgggaggcaagcaggctgtggtgtgtgagccatattggccactggtctggttgagaatgactttttaaagtacaatgtaagtgtgattagtataaatgagctgaaacttaagtgtcaataggattgtatgaaaaagagcaaactttttattaatatcatgtgataaactttgattttttttatgattcagactactattctaagtcagctttgtgtgacttggaaattttctttcatgaaagagtatggctgattagatgatagatgtccatttctgcctgtgcttagtaaatatacatagaagatccttttcatctagaatattttaggtagtcatgtatttgaaaatttattacttaaagtgatggatacagttttgtctcacttgccatatgtactatattctgaattgtttaatactacggtttctctccattgatagtgtgttgcagaatttctaaatgaatataggtgtccaaaatatgttgggttagatatgagcaatgacttttggggtaaatatgaatgtgattgacataatacaaaagcatagtatgaaagcctagcagataaaggtaaaagacacccattttaaaccaaacagtttggcagtcacttacagcaggtgttcctcctctgaggtacatttctttagttaattctagagaaatcactgcaggactcagataaactgaggcagagtgacatcctttaaatcttatattcaattcaaagcaactatgaggttttaatgtcttaagatacaaggacctttgaacttctgttttagtcacagaaaaaaatgtatataaaccttcctttaaataatgaagggattgattttctttttgttcattgagagaacagagaatggacatatctgtctttgttcaatccctggtctctcatttggtaaagatgtcattattgtgagtgcctttatttaaaaacactgaactcaagttgggaagaagtggaaatatttgggacctatcagtttttacccaagtgctaaaatgagtgaaaactatggaggtgaagatgtctgtggtgccattggtgaactgtactgcattctgacagtgtagctacacagtgtgtactatgcctggtcatttctaaagattattttctaattagcttacaagcagcacatttcattgtcactttaataatactttagttgactttccttatttgctcttcttcctcataacctctttcacataactgcacatacacacacacacacacacacacacacacacacacacacacacacacatttaatgtgattttaggtaaataaaattatgaatcctatggcatttcaacatccttattcatgcttttagtcctttctctctttcctcttgacccacttatgagcttccccaactaattcctcatttccccttttatattactcttatgctatgttcctctctctagtgccctccttgacatggtagcattttattttcttggctgtggttactccaggttgtatactcacatctgaagatttggagctaggaaacatatgcaagagagaacatgtgccatttgtgttatttgggttacctctgtcaatgtagtattttttatttattttttaaaatattttttattacatattttcctcaattacatttccaatgctatcccaaaagtcgcccataccctcccccccacttctctacccacccattcccatttttttggccctggtgttcccctgtactggggcatatacagtttgcgtgtccaatgggcctctctttccagtgatggccgactaggccatcttttatacatatgcagctagagtcaagagnnnnnnnnnnnnnnnnnnnnnnnnnnnnnnnnnnnnnnnnnnnnnnnnnnnnnnnnnnnnnnnnnnnnnnnnnnnnnnnnnnnnnnnnnnnnnnnnnnnnnnnnnnnnnnnnnnnnnnnnnnnnnnnnnnnnnnnnnnnnnnnnnnnnnnnnnnnnnnnnnnnnnnnnnnnnnnnnnnnnnnnnnnnnnnnnnnnnnnnnnnnnnnnnnnnnnnnnnnnnnnnnnnnnnnnnnnnnnnnnnnnnnnnnnnnnnnnnnnnnnnnnnnnnnnnnnnnnnnnnnnnnnnnnnnnnnnnnnnnnnnnnnnnnnnnnnnnnnnnnnnnnnnnnnnnnnnnnnnnnnnnnnnnnnnnnnnnnnnnnnnnnnnnnnnnnnnnnnnnnnnnnnnnnnnnnnnnnnnnnnnnnnnnnnnnnnnnnnnnnnnnnnnnnnnnnnnnnnnnnnnnnnnnnnnnnnnnnnnnnnnnnnnnnnnnnnnnnnnnnnnnnnnnnnnnnnnnnnnnnnnnnnnnnnnnnnnnnnnnnnnnnnnnnnnnnnnnnnnnnnnnnnnnnnnnnnnnnnnnnnnnnnnnnnnnnnnnnnnnnnnnnnnnnnnnnnnnnnnnnnnnnnnnnnnnnnnnnnnnnnnnnnnnnnnnnnnnnnnnnnnnnnnnnnnnnnnnnnnnnnnnnnnnnnnnnnnnnnnnnnnnnnnnnnnnnnnnnnnnnnnnnnnnnnnnnnnnnnnnnnnnnnnnnnnnnnnnnnnnnnnnnnnnnnnnnnnnnnnnnnnnnnnnnnnnnnnnnnnnnnnnnnnnnnnnnnnnnnnnnnnnnnnnnnnnnnnnnnnnnnnnnnnnnnnnnnnnnnnnnnnnnnnnnnnnnnnnnnnnnnnnnnnnnnnnnnnnnnnnnnnnnnnnnnnnnnnnnnnnnnnnnnnnnnnnnnnnnnnnnnnnnnnnnnnnnnnnnnnnnnnnnnnnnnnnnnnnnnnnnnnnnnnnnnnnnnnnnnnnnnnnnnnnnnnnnnnnnnnnnnnnnnnnnnnnnnnnnnnnnnnnnnnnnnnnnnnnnnnnnnnnnnnnnnnnnnnnnnnnnnnnnnnnnnnnnnnnnnnnnnnnnnnnnnnnnnnnnnnnnnnnnnnnnnnnnnnnnnnnnnnnnnnnnnnnnnnnnnnnnnnnnnnnnnnnnnnnnntggatggttttagctaccttgtcgaagatcaagtgaccatagatgtgtgggttcatttctgggtcttcaattctattccattggtctacttgtctgtcagtataccagtaccatgcagtttttatcacaattgctctgtagtaaagctttaggtaaggcatggtgattccaccagagcttcttttatccttgagaagagtttttgctatcctaggttttttgttattccagatgaatttgcagattgctctttctaattcgttgaagaaatgagttggaattttgatggggattgcattgaatctgtagattgcttttggcaagatagccatttttacaatgttgatcctcccaatccatgagcatgggagatctttccatcttctgaggtctttaaattctttcttgagagacttgaagttcttatcatacagatctttcacttccttagttagagtcaggccaagatattttatattatttgtgactattgagaagggtgttgtttccctaatttctttctcagcctgtttattctttgtgtagagaaaggccattgacttgtttgagttaattttatatccagctacttcaccgaagctgtttatcaggtttaggagttctctggtggaatttttagggtcacttatatatactgtcatatcatctgcaaaaagtgatattttgacttcctctttaccaatttgtatccccttgatctccttttgttgtcgaattgctctggctaatacttcaagtactatgttgaagaggtagggagaaagtgggaagccttgtctagtccctgattttagtgggattgcttctagcttctctccatttacttagaggctggctactggtttgctgtagattgcttttatcatgtttaggtatgggccttgaattcctgatctttccaagacttttatcatgaatgggtgttggatcttgtcaaatgctttttctgcatctaatgagatgatcatgtggtttttgtctttgagtttgttcatataatggattacattgatggatttttgtatattaaaccatccctgcatccctggaataaagcctacttggtcaggatggatgattgctttaatgtcttcttggatttggttcacgaggattttattgagtatttttgcatcgatattcataagagaaattggtttgaagttctctatctttgttggatctttctgtggtttaggtatcagagtaattgtggcttcataaaatgagttgggtagagaaccttctacatttattttgtgaaatagtttatgcagcactggaattagatcttctttgaaggtctgatagaactctgcactaaacctgtctggtcctgggctttttttttgggctgggagactattaataactgcttctatttctttaggggatatgggattctttagatcgttaacttgatcctgatttaactttggtacctggtatctgtccagaaatttgtccatttcatccaggttttccagttttgttgagtatagccctttgtagaaggatctgatggtgttttggatttcttcaggatctgttgttatgtctccctttacatttctgattttgttaattaggattttgtccctgtgccctctagtgagtctagctaagggtttatctatcttgttgattttctcaaagaaccaacaccttgtttggttaattctttgaatagttcttcttgtttccaattggttgatttcacccctgagtttgattatttcctgcagtctactcctctttagatgtgttgtcaagctgctagtgtgtgctctctccagtttcttcttggaggcactcagagctatgagtttccctcttagaaatgccttcattgtgtcccataagtttgggtatgttgtggcttcattttcattaaactctaaaaagtctttaatttctttctttattccatccttgaccaaggtatcattgagaagagtgttattcagtttccatggtgaaagttggnnnnnnnnnnnnnnnnnnnnnnnnnnnnnnnnnnnnnnnnnnnnnnnnnnnnnnnnnnnnnnnnnnnnnnnnnnnnnnnnnnnnnnnnnnnnnnnnnnnnnnnnnnnnnnnnnnnnnnnnnnnnnnnnnnnnnnnnnnnnnnnnnnnnnnnnnnnnnnnnnnnnnnnnnnnnnnnnnnnnnnnnnnnnnnnnnnnnnnnnnnnnnnnnnnnnnnnnnnnnnnnnnnnnnnnnnnnnnnnnnnnnnnnnnnnnnnnnnnnnnnnnnnnnnnnnnnnnnnnnnnnnnnnnnnnnnnnnnnnnnnnnnnnnnnnnnnnnnnnnnnnnnnnnnnnnnnnnnnnnnnnnnnnnnnnnnnnnnnnnnnnnnnnnnnnnnnnnnnnnnnnnnnnnnnnnnnnnnnnnnnnnnnnnnnnnnnnnnnnnnnnnnnnnnnnnnnnnnnnnnnnnnnnnnnnnnnnnnnnnnnnnnnnnnnnnnnnnnnnnnnnnnnnnnnnnnnnnnnnnnnnnnnnnnnnnnnnnnnnnnnnnnnnnnnnnnnnnnnnnnnnnnnnnnnnnnnnnnnnnnnnnnnnnnnnnnnnnnnnnnnnnnnnnnnnnnnnnnnnnnnnnnnnnnnnnnnnnnnnnnnnnnnnnnnnnnnnnnnnnnnnnnnnnnnnnnnnnnnnnnnnnnnnnnnnnnnnnnnnnnnnnnnnnnnnnnnnnnnnnnnnnnnnnnnnnnnnnnnnnnnnnnnnnnnnnnnnnnnnnnnnnnnnnnnnnnnnnnnnnnnnnnnnnnnnnnnnnnnnnnnnnnnnnnnnnnnnnnnnnnnnnnnnnnnnnnnnnnnnnnnnnnnnnnnnnnnnnntttcttgcttgttctagggcgtgatttctgtccttgtattgtttttttaatgttattatcctttgaagggctgaattcttggaaagataatgggtgaatttggttttgtcgtggaatactttggtttctccatctatggtaattgagagtttggccgggtatagtagcctgggctggcatttgtgatctcttagtgtctgtataacatctgtccaggctcttctggctttcatagtctctggtgaaaagtctgctgtaattctgataggcctgcctttatatgttactttacctttctcccttactgcttttaatattctatctttatttagtgcatttgttgttctgattattatgtgtctggaggaatttcttttctggtccagtctatttggagttctgtaggcttcttgtatgatcatgggcatctctttctttatgtttgggatttttcttctattattttgttgaagatatttgctggccctttaagttgaaaatcttcattctcatcaactcctattatccgtaggtttggtcttctcatcgtgtcctggatttcctggatgtttcgagttaggatccttttgcattttgtattttcttttattgttgtgctgatgttctctatggaatcttctgcacctgagattctctcttccatttcttgtattctgttgctgatgctcgcatctatggttccggatctctttcctagggtttctatctccagtgttgccttgctttgggttttctttattgtgtctacttccctttttagttctagtatggttttgttcatttccatcacttgtttgatgtgttttcctgtttttctttaaggacttctaactgtttggttgtgttttcctgtttttctttaaggacctgtaactctttagcagtgctctcctgtatttctttaagtgagttatttaagtccttcttgatgttctctaccatcatcatgagaaatgtttttaaatctgggtctagattttcggttgtgttggggtgcccaggactaggtggggtgggagtgctgtgttctgatgatggtgagtggttttgatttttgttagtaggattcttacgtttgccttttgccatctggtaatctctgaagctagctgttatagttgtctctggttagagcttgttcctcaggtgactctgttagcctctataagcagacctgggaggctacctctctcttcttgcagggaaggtgcccagatatctggtgtttgaacctgcctccttgcagaagttgtgttccactcaccagaggtctaaggatcttgtggggaatcctgtgtgggcccttgcgggtgtggggagactctggtggcaaggcaccccggtgctcgagtggaccggaagggacttgtgccccaggtcaggctgggtagtctgcttccctatttacctcagtctcaggttcagcgtgattggattggggcagacactgtgttccactcaccagaggtcttaggatctcgtggggaatcctgtgtgggcccttgcgggtttcgggagactctgctggcaaggcatcccggtgctcgagtggaccggaagggacttgtgccccaggtcaggctgggtagtctgcttccctagttaatgcagtctcaggttccgagagattggattggggcaggcgctgtgttctactcaccagaggtcttaggatcccgtggggaatcaatgtagtattttttagttctatttgcttacttataaattccatgattttacttttccttacagatgaataatattttataatgtctgtgtatcacactttcattactcgttaatcagttggaggacatttgggatgtttcagtttccttgctatcgtgatgaaagcagtgatgaatctggctggagaagtacctgttgagacatttgagcatcacaaggagtggtagagctgggtcatatggtagatttatttttagctttttgaggattctttgtattaatttccagagtagatgtaccagtttgcaattctaacaacagttaatgagtgtttattcccctttccctgcagcctcctgagcattttttttgtgatctttgccaattctgactccaatgagatgacatcacaaatttgctttgatttgtatttctttaattgctaaggacaaagaacatcttttcaaatatttcttagcaatttatattcctgttttgagaactctgcatttggatctgcatttgggtttgaatgggtcttttttctttttcttttctcttctcttctcttctcttctcttctcttctcttctcttctcttctcttctcttctcttctcttctcttctcttctcttctccttccttccttccttccttccttccttccttccttccttccttccttcctctctctctctctctctctctctctctctctctctctctttctttctttctttctttctttctcccttttttctttctttttttttcctgttttgagttctttagaatattctgaatattattattgtcagatatatagctggcaaactttctttccttctgtatgggctttctcttcacttaattgtttcatcagttctgaagaaactttttagctttcttttgaactttttaggaattaaaatataattgtcatttttctccattcatttttcactcttaaattttcccaagtactttactgttttaaactttcccaagtacctgccctctaacctctcccatcctctttactccttctcaaattcatgtcctcttttttattgttttatagtcatataattgttatatatgttaatttcataaggtacataaacacaatgcattgtatctgttaagtgttgtttgtgtgtatttgatttcagggcttacaatttggtattgaataactaattaggaggttcattctcaagaatgactaattcttcccctttcagcagtcattagttgtctgtagatttctctctctctctttttcccccaagggaattttttctccagttcaacttttttttttaatttattttattttatttacttttctttttacactccagattttttattggatattttatttatttacatttcaaatgttatctcctttcccagttttccctctggaaacctcttaacccaccaccccctgcttctatgaggatgttcccctacccacccaccaactgttatctcccccctcttcactggaccaagggcctctcctcccattgatgtccaacaaggccatcctctgctacatatgtagctggagccataggtcctttcatgtgtactctttggttggtagtttagttcctgggagttcggggtgggggggaggtctggttgtttgatattgttcttactatgggttgtaaacaccctctgctccttcagtccttttctctaactcctccattgggggtccctgggnnnnnnnnnnnnnnnnnnnntttggtgtctgcagatgggataaatccctatgtggggcattctctggatggcctttccttcagtctctgctccacacttcctctccgtatttcctccctggagtattttgttcctcctcctaataaggactgaaacatccacactttgatctaccttattcgtgagttgcggtctgtgaattgtatcttgggtattctgagcttttgagctaatgtccacttatcagtgagtgcataccatgtgattgggttaccgcactcaggatattttctaattccattcatttgcctaagaatttcatgaactcattgttccccctcctgatccaccttctggctgttccacatcccttacctcctcccccgctgccctctcttcccagatatccgcaccctagccccccaccccatcaggcattcccatgttatgccctgagtacaccaggggaaacccaggtgagctcaagaatttcgaagtccactgcaactttttattgcttcaagtcttgactcgtatcatatgccccacactcacagggtaaattctgagtccagaaagcattgggtttatatgcagtataattaggaatttcttgaatgctcaggacaaaggggagtagagggctataaccatttggtgggatggaaatggagcagggagggggattaatgggtgtctgttgtggggttatcaggaactaacacaacactggagtctctttggtgaggcttccaagaagcagggcaattaactgcagagagttagttaacatcagtaactcgggggctacaacacccactccttgggacctccagtctcttgaggattaggtgcatcttctctgactgaacccagacctgacattcctctgttatatatgtgtgttgcgggcttcatatcagctggtgtatgctccctggttggtgttccagtatctgagacatcttggaggtccagcttaattgggactgctggtcctcctacagggtcaccctcctcttcaggttcttccagcttttccataattcaatcacgggggccagctgcttctgtccaagggaatacttttattgattttttttttttggaatatcacataatgtacccaatcatacttcccagggaatagtgaaaaaacaatgattaagctgaggtgcttgagaggagggcaaagtagaagagggagcacagggaaggatgaatcaccaaagatctttaaaaatagacataccaaaacctactactatagaacaattttatacatgcataaaaatgttaaaatggagttttcccatatcagaatcaacattatcactacaagacaaataaaaaataaaaagcccacataggttatgacaagtgcctttcagaggttgaaagtaagtccttcttgctacaaatacctcatatttcaaacacaggactcacaagattcaagcttggactgaggattagcttttacagtactaatgctagctgctaagggaaggaaggaaccaaacaaaagttctacctagccaggatgtctatgaggcacatttactaatacagcaagataattctgaaggtttggcattcataccttggtagtaaccaaaagctctctagttatacttaaggaccactcaaggggaaggaagtaatttctggtactagaactcagtcaacccctcataactagtgaggtcatggatcttaggtgagaacatacaaacatcactgttttagaccagaataattcttaactgcattctaaatacttggttttataagcaaagataagtttatctcgcatcctccccatggggggaaaaaccctctctttgcagcagaaaaccacaactggtgagattatagaggtcaacaaatcatagggtacctgtatccaaggctcatggaacattgcacaagaggcgctgggagttttataagagtggaggaccagaaaatctgctgtaagattatatttcttaaaatgatagggtatctatccatgatacttcaaaatatggctacctaaaccaggctagaaagaaaaatggcaacagcaacaagcatgttaaccaagaagggggaaatgaaactggttccattcctacacacacacacacacacacacacacacacacacacacacaaaacgacagccaccaagggccaggttgatgtctgtcttcctgctgcagccaagggccatgttcttttaaataaatttatctctttcttgacactttctagtttttttgaatataaacattttaaagtatgttcgcaagatcttatgaattttcttggagtctgttaagatgtattacttttcatctctaattttctttcttttttttttttctcacttttttttttattttttttaatataacttttttttttttaaagatttttatttttatttattatatgtaagtacactatagctgtcttcagacactccagaagagggcgtcagatcttgttacagatggttgtgagccaccatgtggttgctgggatttgaactctggaccttcggaagagcagtcgggtgctcttacccactgagccatctcaccagccccatctctaattttcttgatctgcatcaataaaattatggctagtttgactaagtatttgtcaatcttgttatatttccagagtaccaattccttatttctttgattctttttttttacttctagttcactaatttcagctcttaatgttattatctctttccatctactttttaaagggtgttgcttgttcttgtttttctatggctttttggtacatcattaagttatttatttgagatctctcaaatcttttgatgtagaaacatagtgatatagaattccctcttatgactgctttcattgtatctcaatagattttagtatgttgtgttttcattttcatttacatatagaaaaaagttgacaccctttttcctttacccaattttggctcagtattgtgttgaactttcatagattagtgtactttctgtcttgtgtggtgttcagatagaatgaggcatataatttcaatttctctgcattttttgagattttttttgtgtcttattttgtgggaagtcccaaggactgctaagaagaatttgtattctttagtttttgggtgaaattatatatacatttcagatgattttatgatgtcattaattttcagagtctttttagactatttagtatttttaaagataacctttgaaatggtttcaatatgcttggcccagggaatgacattattaggaagtttagccttgttggagtaggtgtgtcactgtgggcatggcctttaatacccttatcctagctacctggaaggcagtattttcctagtagcctccaaatgaagatgtagaactctcagctcttcctgcactattcctgcctagaaactgctgtgctcccaccttgatgataatggactaaacctctgaacctataaaccagccccagttaaatgttatccttataagagttgccttggtcatagtgtctgttcatagcagtaaaaccctaactaatacaacctacttattggttaaaattaggtcttaaattgtcattgttactgttctggatttttttctacagtttaagcctaatagtatttcttttatgaaattgtcactatttttggtacatatatgtttagcattgctatatcctagtcttggacttttctatcaatgaggatagtgttcctccttatctcatgtgatccaccttgctttgaagtctgtcttgtcacatattagaatattacacttgtttattttctggtttatttggttggaatacctttttccttccttttaccctaaggtgctatgtatgaaatgggctgccatttgtgttctcttagggtctgtataacctctgtccagcatcttcctgctttcaggtgagatgtctgtgtaattctaataggcctgcctttatatgttacttgacctttcccccttactgcttttaatattctatctttatttagtgcatttgttgttctgattattatgtgtagggaggaatttgttttctggtccagtctatttggagttctgtaggcttctcatatgttcatgggcatctctttctttaggttagtgaagttttcttctataattttgccctttaagttgaaaatcttcattctcatccattcctactatccttaggtttggtcttctcattttgtcctggatttcctggatgttttgagttaggatctttttgcattttctttgattgttgtgtccatgttttctatggaatcttctgcacctgagattctctcttccatctcttgtattctgttgctgatgctggcatctatggttccagatttctttcctagggtttctatctccagcattgcctcactttgggttttctttattgtttctacttctatttttagatattacatggaagatttatatatttgtccaattccatcacctgttcggttgtgttttcctgtaattctttaagggatttttgtatttcctctttaaggacttctacctgtttagctgcactttcttgtaattctttgagggatttttgtgcttctttttaaaggacttctacctatttagcagtgttctcctgtatttctttaagtgagttgttaatgcccttcttttttttttaatttaattttatttttattaggtattttcctcgtttacattttcaatgctatcccaaaagtccgcaatacccacccccccccccaatccactacccacccactcccccgttttggccctggggttcccctgtactgaggcatatacagtttgcaagtccaatgggcctctctttgcagtgatggccgactaggccatcttttgacacatatgcagctagagtcaagagctccggggtattggttagttcataatgttgttccacctatagagttgcagttccttttagctccttgagtaatttctctagctcctccattgggggccgtgtgacccatccaatagctgactgtgatcatccacttctgtgtttgctaggccccggcatagtctcacaagagacagctatatctgggtcctttcagcaaaatcttgctagtgtatgcaatggtgtcagcgtttgggagctgattatgggatggatccctgcatatggcaatcactagatggtccatcctttcgtcacagctccaaattttgtctctgtaactccttcaatgggtgttttgttcccagttctaagaaggggcaaagtgtccacactttggtcttcgttcttcttgagtttcatgtgtttagcaaattgtatcttatatcttgggtatcctaagtttctgggctaatatccacttatcagtgagtacatattttgcgagttcctttgtgtttgggttacctcactcaggatgatgccctccaggtccatccatttgcctaggaatttcataaattcatttttttaatagctgagtagtattccattgtgtaaatgtaccacattttctgtatccattcctctgttgaggggcatctgggttctttccagtatctggctattataaataaggctgctatgaacatagtggaggttaatgcccttcttaaagtcctctaccagcatcatgagatatgattttaaatctgaatcttgcttttcaggtgtgttggggtatccaggacttgctgtggtgggagtactgggttctgatgatgtcaagtggtcttgctttctgttagtaaggttcttatgtttgccttttgccatctgataatctctggtgttagatgttctagctgtctctggctggaacttgttcctcctgtgattctgttagcctctgccagcactcctgggagtccagctctctcctgagtcccagtggtcagagcactttctgcaggcaagctttcctcttgcagggaaggtgcccagaggtctgggtctcagctctgcctcctggctgaagatgaaggccagaagggaccctgtccaacaagctcttcgtacagggtggcttctgcgccccaagagctctcctgtgccgactggtctctgagagacctgggatacatgatggtcccggtgtcagagctctctctggaggcctactctcctcagtgatcctaagatcctgggtgcgctagggcacctgtggcatgtagagtcctctgtggaccatgggaccatccgagctggcgctgaccagaatgtgtttaaactcttattactagttacagtaaatttttaatgattaaatttttttaacactaaaatattttgtattcactttcaggtatcatagatctttgtggttgtcactaaggtttctcacatgctattactatttataagtttctgcagaaatacatgtaaacattaaatggcttgcttaatatcttttaaaataaaaagtcaaaattaatttttttttttttggtttttcgagacagggtttctctgtatagccctggctgtcctagaactcagtttatagaccaggctggcctcgaactcagaaatccgcctgcctctgcctcccaagtgctgggattaaaggcatgagccaccatgcctggctcaaaattaatttttaaggttaatacttaaagtgatgggcttcattatgatattttacacatatatgtcattatgtgtcttttaaaaaagcatatgtcattagggtatttgccagctattagcatgattataagaaaattaaaccagttcttttcctccttctctttctcctccttctgttgtttcttttctaaaatagcatttcatccaacaggagaaaaaactgttttaactctttcctggaagattaacatacttaaattcaaatccaacaattcattatttttctttttaagtaaaaactttaaaaaggaatttcagatgtgtttgtaaagttttttgtttcatttgccttggtttatattgacttgtttgactcttgagaaatacagtagtaaatatatacagctaatatcctcaatactaatttgttgcatttattcatgtgtatgtatgtgtgtgctcatgtttagatatgcatgcttcaaatatgattcttttattcagcttacagtgtctgaaaaatataagaccaatcaatattcattttctgtttttcccatttgatcctcaaatcaggatggagatcctgttcgccctggagtggccatgactgacctcgccactggtctttttgcttatggggccattatggctggcctcctacaacgttatagaactggaaaaggactgttcattgattgtaatctgctgtcatcacaggtactaatctatctaacattttagttgatataacaatctgttggattatacctttttaaatagaatctggtggtcacatgtgtaaaacccattaaaattaaaaaagcaaacacaccctgtatactgctttgttttgaatgtattttcttatatattataattaaaaataattaaattgttttgttacaatttaaacactgttgtttaattagaattccaggttctccttgtactagaatggtttctatcctcctgttgagagcacagtagggttcttctgtttcactgatatatgagctctgtaacttccttggtgtcgtttcttcacattttatataccgtggactctctggtaagtctgctgaaatatgtggaccttatcttgggatcgttttcttaagttcataaaatgaggcagttgaattacaagagaagtaagttatatggaaatatgtgtctgtcaatttaaaaataacttttgtgttatcataatatatggcttttactaacacatgaaaattgatggaaattgaattatgttaggtaagtggtctgctcctatgctatgtcctcagccctctttttacatttcattttgagacaatctgattaagttgactgaccttgaactcaaattacaactgagggagattctgaacttgacatctctctgctttagcctctggtgacataatagtggttgcaaaaccattaacaatttgatgtaatgttgacaagaaatgatatctcaagaagtatgcaggagataatatgatatgaaaggatgtataaaattatcagtaatcaagtcatagatattgcttacactctggtggtttcattgcctgtgttcataattatttaggccagagcttgatgaaaataaagatatctttttgtgtatacttacgttatttaactcctggaacactatccagagactccagactaacctccccatttagacttttacagttacactgtagtaggcacaagactggtgaaatgaaagggttaactcacttctaacatgacattttgcctactttactggatcggacccagatgctgtaccatatgtggaagttaattctgaatagataacttttcagggataggaaaaagaaaatatctaatttgtgcaaggagacattttactgtgggaaaattactttctagacatagagatctcagttgggaatttcagatttaagtggcatacatgggaaaatagtaaacttggaacactacattggagatttttttctcttaggcaagattaaggaggtgtatagaaataaaaaagtcagtatggttgatgttgaaatactgtgtatgagtttttaacagcaactttgaatcactgttagaattttaatggttttataaaaggataaaagatctctgttcagatgagttatcttgcttctccacagaaagccacagatggtagttatgggaaggaactaaaagacttttttcttttttctgtgttaatagctgtaatgaacctgaggtaagttaagtaaccaaataaaacctacatatccaataaatgtgtaagacatgaaagtttcataggtgtgtgagatgtgtaatcctatgggtttctgggcttactttgtagatcttactctctttgtcttgaaatgcttaacatttctgaacagaagattttgtgtttttatttttcatttttcaccaagccttctaaattatgtagagtttcatctataccagttctttactttatacgtcaattattaattaatacattcattttcaaaacagttatttattacggtataatagaagttaaaaagtcttctagcactgaattggtgattccccatgtggaacatgttctcacatgcaaaactgcttcaaaatgagtaaactcatggtcacatacactcagatgnnnnnnnnnnnnnnnnnnnnnnnnnnnnnnnnnnnnnnnnnnnnnnnnnnnnnnnnnnnnnnnnnnnnnnnnnnnnnnnnnnnnnnnnnnnnnnnnnnnnnnnnnnnnnnnnnnnnnnnnnnnnnnnnnnnnnnnnnnnnnnnnnnnnnnnnnnnnnnnnnnnnnnnnnnnnnnnnnnnnnnnnnnnnnnnnnnnnnnnnnnnnnnnnnnnnnnnnnnnnnnnnnnnnnnnnnnnnnnnnnnnnnnnnnnnnnnnnnnnnnnnnnnnnnnnnnnnnnnnnnnnnnnnnnnnnnnnnnnnnnnnnnnnnnnnnnnnnnnnnnnnnnnnnnnnnnnnnnnnnnnnnnnnnnnnnnnnnnnnnnnnnnnnnnnnnnnnnnnnnnntttagaaaagaacaggcttcctagtgttattaaccaaagactacattacaagatgcaataagactaggcataaaccctcatatcaagtctggataaggtaacccattgggagggaaaaggtcctaagaacactattaggaatcccataaacatcctaagtggaacaacaacaacatgtatgcagaggcacacaaagttgtgtgtgtgtctatgtgtgtatgtgtgtatgtccctgtctctctgtttctctgtctcagcctctctctctgtagttatggtgtccatattgattattgagactgtaagcttcgatagtctaagaaaaatgtcttcctttgagcttttcacagcatcgtcaatgttcagtccagtatttatgaaataccaagctatccgtggtattttttttcaatgagaaacattctcattgaaagaatgaggatatagtttcaaatatttgaaaattatttctagttggtagcactgtttgcaggggtggtggtggtggttatgaagcctctgggaaacggaaacttgccataggaagtgtgtcttttggggataggcctggtgtatttatagcctggctctattgcctgttcattctgtttccttactgctaacacaatgttacctgctctatacctttcgctgcctctctcttcctgttgacatgcctcttttgttgtgatggagtgatcccctgacgctgttagctagaataaacaaacatcttcccttaaatagtttcttttcagatatttgcttacagcagtgaggaaagcaaccaatccataaaattgatactggcaagtagggctgaatcttttataaacctaatcatgtagttttttggaactggtttacacgaggaagaaaatggaactttgtgctagaaaacccccagaatgctgtgaaaggagcttaatgggccattctggtgagagttcagaagaccaaaacgataagtgataagcaaatagtggaggcctgagctagtgagatctagaattgggcttgctataattacatctgagtgaagaaatttggcagtattttgtctgtggggtgagaacttgtgtgaagctgagtaatagtctagttttattggtgggagaaatttcaaatagcatagcattcagtccatgacatggttccttctcagtgttcttatttagatacacagtgagagcaaaaagatgaaatccatgaagtttagcgaggaaaattgcgtgagcaactttaaaattttggacaaggaacagaacattcagaggaaaaagcattcataattgttaaagagtaacctcattgtcttcaaaaaggaaggtgcctgaagacaacatcccatccatcaaaggtcccaacttgtaaaaatgcaaatttatttgacaggagaaagcagtctgatttagaatggcataaaatgggttattttctaggagcaattgcccaggagagtgatgctgcagactcatccaccaggacactacagctgtgttgtttccaaacagcagactaaactaggctggcagaagaactttgcagtgtggtgtcaatggtactaatggttgctcatgtgagaccaaaacaggaaaatgtaccttgtaggttaagacttctgtttgtacttaggaataaatttctgtttgctctttgtttgtttgaccctctgtaccagatatgtttaatcacatgtgtgcaggagataggtggtcagaaaatactaaggatatatgcttgcctgtgagtggacctgattagaaatgtggtgaattatgggttttacattcttaagcccctggaaagcaagacttgtagccatttttctgggtatccagatatggacctgaccagagtacattcacttagtcagtatttaattaaagcttgctttaaatggttaaattgtggtagtagtcttattcttttttgcttgtttttaaagatttatttatgtatatcggtgctttgtctgcatgcacatctgcacacttgaagagggcactcgatcctatgatgctacagttacagatgattgtgagtcactctgtgggttctgggaactgaacttggaacctctggaagaacaaccagtgctcttaaccactgagatatctctcctgcacctgtagtcttattcttgactggggggattaattctagcatgaaaggttcaaaactgagggatcattaagtcttacgctaaacttacaggaagctgtggaggtcaggcaatgtgggacaatgttagaacctcggtaagaggccctgagaggccatttcatgaagctgagattttatcaatttcagctgcaatggagggcccaggatgctggagatgccaggactaccagatatctgccaaggaaagagccagcctgtgcaagagagaggtcataattgttctgcataacaggtctggagggaccaggctagccaaaccctctggagagcacaggaacccatcaggagtccaagatgcctgatttggtgtttcaggattgtttgccatgatgtattttgtcattcttttggtccatcttttttcctgatatgtttctattcttcctttttgcagtgggaatgtctactctgtgccattgtatattgaaagtatgtaacttgtttattatgcaatttaacccacagttaagaggttgtgtttcaaaagacaatttgggcttttgaagtgttggcactgttaatatctatgggaacttttgaagtccattaaatacatttttgttattgagttggccattagcatacatagtatgggttcaaagaccaaatgtggtttgaatacaaaatgtcccttctagatttatgcatttgagtttttggtgcccaagttggtggcactgtttgggatggttgtggagccttgaagaggtagaatcttaccagaggaagtaggtccttatgggtagaccttgaggttttatagctagatcacacttctttttcatgattgctaatgaaatgtgactgaccaaacttctgctcctcatgccttccctgtaagaagagacttctttgatgaggcatgatagctccacttacttgtaggtataagggtaagatttagaatacagttaagaattatgtgggtctagcagattgctggtagtagattctcttctaagatccatgaattcaactaaactccaggaaattttactaggtttctaggaacagacatgatttcccttctgttcagggagccttaaattaatttggacagctgttgattatcaccaaaatgtgagtgccactttttgtattatcttaatcacttttctatagctgcaataaaacaccatgaacataaaaggaagaatttattttttgttaacagtaccagagggttagagtccatgatataggaatggacgtagtgtgtgatgggtgactagcgttgcatttaaaaactccaaccacaaacaggaaacagagaaagggctaactcaaatgacatgagtcttttgaaacctcaaagtctgtgttcctccagcaatgctgcacctcctaatccttcccaaagagccactgatggaacctagcatcaaaatgcctaagacttaagatggactctttattcaaactaccacatgtactgttatggtaatctttctatgctggtcattgttggttcataggtttaacagctgggaaggacactaattgtttcattcacacacacacacacacacacacacacacacatatgtgtgtgtgtatatagattgtatatatttatatttaaatcattgcatataattttaggtaagcttgaggctttatcaaacaatcttagtgtttttgtcctcctttcctccttttccttcgtgttgacacccctctcccagttggaagcccctttcagtttttccttttattttttcatatcacctgtatcctgctattcccctttaagccctccctagtggttcatttataccttcctggtttctgcagttgttccatattatatactcacatctgaagacttggagctaggaatcacagctgagagataatatgagacatttatctttcttttttatgcagttttaattttttataacttcatatgtgaatatagtatttacatcctttctattcttcctgctttctttcttttttttcttcctgctttcttttaactccttccagacccccaacttcctctcaaatacacgatcccttcttgtataattacagttgcattatctacacacacaccctactaagttatgttcttatgttcttgtgtagttcttatgtttgagtgtttgaaatgactgcttggtattggataatgtatcgggggcttgtccctggagaaaggattccatttttctcagcagccattgattgcctgtagctcttcatatagaggtgaagcattgtaaactttgccctgtggacatttttacgtaaactgatgatactattatgcaggttaccacatagttgatgttttgtgcttgcagcattcctgttatttcttgaagacactatctagtatcagatatcctgatcttcagatttttattttatttatttattttttttagcatttcttattcatccataatatttcttgagccccaggtctagggtttattctagataatactaattggaaatggacacccaatggccgcttgttctctgcattttgatgagttgtaagtctctgagatagccttcatgtgctgataaaaaaaatcttttttgaccagggctgagagctacacttacagttagaaattattttgatttaggaaactgatagtagtaagttttcctctagggtccatgacatcttcagccatgggatgtctcctaggtttacagtaccaggcaggaactaatttgacttgcatgttttgataacattccattactgagggatgcaaagacaggactaaaacaggccaggaatctggatacaggaatgaagcagaccatggagagatgctacttattggcttgctctgaatggattgctcatcttactttgttatacaacctacgactacctatcagtgagtggcaccactgacagtagctggaccttctcacattaatcattaatcaagaaaatgcctcacagacttgcctatcagccaatcttatggagctgttttctcaattgatgatgtttcttcccagatttccctagcttatgtcatgttgacaatcatgacaaccccaccaccacaaaaaaaaccctaagcagcacatcttctctggagatgcttgcatggcaccttccaatactatgaagtctagtcctcagggaggaggcttccaagtcagtatcagcttgactccccccaagtcccctgcctgaagtgtgtggtgtcttcaacattagggtatcaacttcaagatatgggagacaaccaagagcaataacaataggctacattgttttgggtttgtcttgggtactctttgaccagtaactcatagagaggtttccaatgcctggtgtaggtaggattgtgtttcagctgaagctgaacaccccatggtgtcttgtagtttgatgaatttttgctttctgtaatgatctcatgctgaaaaaagaagcctcttgatgagagatgagatctacacttatctgtcggtataaggataagtgtttaaaatgttaggaattatactggtgtgctggctagtatttggctaacttgctatagactacagtcatttgggaagagggacctcagttgaaaaccttctacatagatcgacgagtggggttcctccccccaacccccggaggggcttaatgattgatgtggagtgcccattgtcggttgtgcttccccagggcagatgttcctgagttatataagaaaacagctgagtgggttacaaagagcaagccagtaggcagcatttttctgaggattttgctttagtttctgcctcatggttcttgccttgaactcatttccttacttttctcagtaatggagtgtgacctgagagttgtaagctggaatgaatccctctacaagtagtttttggacatggtgttttatcacaatcatagaaacctaaggcaagtggcttaggaaagttgtagtagttgttttgttctactctcccctgtgggccatgaacttattagtcacaggttgttggttaggtttccattatcaggtatgatttacctcttgtttattgtgctttaagtactattagagaactgttgtttaccatcaggatatatctgcaacaattgactttcctatcctcatcattgctgtggttcacagtaatcaatgtttattgattgctttgtgtcatagcaaattgaatatcatctcctattactatgacagctaatttttgggtaggaggcttttgggtcagacccagcttaaatgttctcagtcctgtgtccaaagtttgcagtgtcttcagcaaaagattatttaccttcaacttctgggaggcaaccaagggaaacagcaatagcttaaattgttttaagaatctcttgtgttcctctgacccacaactcaaatgaggtttgttggcactaatttttttttttttggtctcctttactctgttcttatatttctatctctcttccaacccttaattttatcctaatccctttcaccccccaacactaggtaggagagaaagaagattagaggaaaaaaggggcactgacttctttcggccaacaaaatagactacatcctgttgaataggggcattgagttccttgggggtgaatccaaaattcttcgtcaggatatcttcaacttctcatcaaacctcaatatgagcaaccaggagcacaagctgcctccctgagaactcctgactctcttgtggctctggctttaataccttccagaattaaactatctgtagctggcaaagatcaattccctgctagtgcattaggcaaattacaatcataattttctttatataaatttcaaatgctatcccgaaacttcacaatacactacctccctactgttcccctactaacccactcctgcttcttggccctggcattcccctgtactggggcatataaagtttgcaataccaaggggcctctcttcccagtgatggacatcttctgctacatatgcagctagagctatgaactctggaggtactggttagttcatattgttgttccacctatagggttgcagaccccttcagctccttgggtgctttctctagcttctccattgggggccctgtgttccatcttatagatgactgtgaacatccacttctgtatttgccaggcactggcatagtctcatatgagacagctataatagggtcccttcagcaaaatcttgttggcatatgcaatagtgtctgggtttggtggctgattatgggatggatccatgggtggggtagtctctggatagtccatcctttcgtcttagctctaaactctgtctctgtaactcctttaatgggtatttggttccctattctaatgaggaatgaaatatccatccattggtcttccctcttcttgattttcttgtgttttgcaaattgtatcttgggtgttctatgtttctgggctaatatccacttatcagtgagtgcatatctaatgatttcttttgtgattgggttacctcactaaggatgatatcctccagatacatccctttgtccaaaaatttcacaaatttttaatagctgactagtactccattgtgtaaatgtaccacattttctgtatccattcttctgttgagggacatctgggttctttccaccttctggctattataaataaggctgctatgtacatagtggagcatatgttcttattaccagttggaacttcttctggatatatacccaggagaggtattgctggatctggcagtagtattatgtccaattttctgaggaaactccagactgacttccagagtggttgtacaagcttgcaatcccaccaacaatggaggagtgtccctctttctccacatcctcaccagcatctgctgtcacctgaatttttgatcttagccattctgactggtgtgaggtggaatctcagggttgttttgatttgcatttccctgatgatgaaggatgttgaacctttttttcagatgcttctcagccatttggtattcctcaggtgagaattctttgtttagcactgaaccccattttttaatggggttatttgaatttctggagtccagcttcttgagctctttttatatattggctattagtcccctattggatttaggattggtaaagatcctttcccaatctgttggtggcctttttgtcttatttacagtgtcctttgccttagagaagctttgcaattttacgaggtcccatttgtcaattcttttcttttttaatttatttttttaattaggtattttcttcatttacatttcaaatgctatcccaaaagtcccccaaacccgacccccccccaactcccctacctacccactcccacttcttggccctggcattcccccgtactgaagtttataaagtttgcaagaccaaggggcctctcttcccaatgatggctgactaggacatcttctgatacatatgcatccacttctgtgtttgccaggccccggcatagcctcacaagagacagctatatcagggtcctttcagcaaaatcttgctggtgtctgcaatggtatcagcatttggaggctgattttgggatggattcccgggtatggcagtctctagatggtccatcctttcatctcagctccaaactttgtctctgtaaacccttccatggttgttttgttcatagcagccttatttataatagccagaagctggaaagaactcagatgtccctcaacggaggaatggatacagaaaatgtggtacgtttaaacaatgcagtactactcagctattaaaaacaatgaatttatgaaattcctaggcaaatggatggacctggagggcatcatcctgagtgaggtaacccaatcacaaaagaactcacatgatatgtacttgctgataagtggatattagcccagaaacttagaatacccaagatacaagatacaatttgcaaaacacatgaaactcaagaagaacaaattccaaagtgtggatacttttccccttcttagaattgggaacaaaacacccatttgtcaattcttgatcttacagtgcaagccattgctgttctgtttaggactttttcccatgtgcccatatcttcgaggatttcccctactttctcctatataagtttcattgtctcttgtcttatgtggaggtctttgatccacttagacttgagctttgtacaaggagataagaatgggtcaattcacattcttctacatgataactaccagttgtgccagcaccatttgttgaaaacgctgtcttttttccactggatggttttaggtcccttgtcgaagatcaagtgatcatagctgtgtgcattcatttctgggtcttcaattctattccattgatctacatgtctgtcactgtaccagtaccatgcagtttttatcacaattgctctgtagtacagctttaggtcaggcatggtgattccaccagaggttcttttatcattgagaagagtttttgctatcctaggttttttgttattccagattaatttgcaaatttccctttctaattcattgaagaattgagttggaattttgatggggattgcagtgaatctatggattgcttttggcaagatagccatttttactatattgatcctgacaattcatgagcatgggagatctttccatcttctgagatcttcttcaatttctttcttcagagacttgaagttcttatcatacagatcttatacttccttagttagagtcacgccaaggtattttatattatttgtgactattgtgaagggtgttgtttccctaatttctttctcagtccatttatcctttgtgtagagaaaggccattgatttgtttgagttaatcttacatccagctactgcactgaagctgtttatcaggtttaggaggtctctggtggaatttttggggtaacttatatttactatcatttcatctgcaaacagtgatattttgacttcttcctttccaaattatacttgatctcctttttgttgtcgaattgctctggctaggacttcaagtacaatgttggataggtagggagaaagtgggcagccttgtctagtccctgattttagtggaattgctttgagtttctctccatttagtttgatgttggctactggtttgctgtaaatttcttctattatgtttaggtatgggccttgaattcctgatctttccaagacttttatcatgaatgagtgttgaattttgtcaaatgctttctccgtgtctaatgagatgatcatatggtttttgtctttgagtttgtttatatagtggattacattgatggatttccatatattaaaccatccctgcatccctgggatgaagcctacttggtcatgatggatgatcattttgatgtgtttttgtattcagtttgcgagaattttattgagtatttttgcatcgatattcataagtgaaattggtctgaagttctctttctttgttggatctttgtgtggtttaggtatcagagtaattgtggctttatagaatgaattgggtagagtaccttctatttctattttgtggaatagtttgaggagtgatggaattaggtcttctttgaaggtctgatagaattctgcattaaacacatttggtcctgggcttttttttggttgagagactattggtgactgcttctaattctttatgggaaatgggactgtttagatgcttaatctgatcctaaattaactttggtacctggtatctgtccaggaaattgtccatttcatccaggttttctagttttgttgagtatagccttttgtagtaggatctgatgatgttttggatttcctcaggttctgttgttatgtctcctttttcatttttgactttcttaattaggatattgttcctgtgtcctctagttagtctggctaagggtttatctatcttgttgattttctcaaagaaccagctcctggtttgattgaatctttgaatagttctttttgtttccacttggttgacttcagccctgagtttgattatttcctgccatctactcctcttgggtgaatttgcttcctttagttctagagtttctaggagtgctgtcaggctgctagtgtatgctctctctagtttctttttggaaacactcaggcttatgagttttcttcttaggactgccttcattgtgtccataagtttgggtatgttgtggcttcattttcattaaactctaacaactctttaatttctttctttatttcatccttgaccaagtaatcatttagtagagggttgtttagtttccacgtgaatgttggctctctattatttatgttgttattgaagatcagccttagtctgtggtgatcagataggatgcatgggataatttcaatatttttgtatctgttgagtcctgttttgtgaccaactttgtggtcaattttggaggaggtaccatgtggcactgagaagaaggtatatccttttgttttaggataaaatgttttatagatatcaattaaattcattcgtttcataactttggttagtgtccatgtgtctatgtttagtttctgtttccagggtctgtccattggtgagagtggggtgttgaagtctcccactattattgtgtgaggtgcaatgtgtgctttgagctttaccaaagtttctttaatgaatgtggcccttgtatttggagcatagatattcagaagtgagagttcatcttggtagattttacctttgatgagtatgaagtgcccctccttgtcttttttgataactttctatttgaagtcaattttattcgacataagcatggctactccagcttgtttcttcggacatttgcttgtaaaattgttttccagcctttcactctgaggtagtgtctatccttttccctgagatgggtttcctgtaagcaacaaaatgctgggtcctgtttgtgtagccagtcttttagtctgtgtctttttttggggaattgagtccattgatgttaagagaaattacagaaaaataattgttgctttctattatttttgttgttaaagttgggattctgttcttgcggctgtcttcatttaggtttgatgaaggattgctttcttgctttttctagggtgtagtttccatccttgtgttggtgtttttcctttattatcctttgaaggtctggattcgtggaaagagattgtgtgaatttggttttatcatggaatactttggtttctccgtctatggtaatagcgagttttgctggttatagtagcctgggctggcatttctgttctcttagggtctgcataacatctgtctaggatcttctggctttcatagtctctgatgagaagtctggtgtaattaaaataggcctgcctttatatgttacttgacctttttctcttacagttttaacattctgtctttatttagtgtatttgttgttctgattattatgtgttgggaggaatttcttttctggtccagtctatttggagttctgtagggttcctgtatgttcatggtcatgtctttctttaggtttggaaagttttcttctataattttgttgaagatatttgctggccctttaatttgagaattttcattctcatctatgcctacgtaggtttggtcttctcattgtgtcctggatttcctggaagttttgagttaggatctttttgcattttgcattttcttcgattgattgttgtgccaatgttctgtatggaatcttctgtatctgagattctctcttccatctcttgtattttgttgcttatgcttacatctatggttccagctttctttcctacggtttctatctccattgttgtctcactttgggttttctttattgtgtctacttccatttctaggtcttggatggttttgttcaattccatcacctgtttggttgtgttttcctgtatttctttaaggacttctacctctttagcagtgtctcctgtatttctttaaatgggtttttaaagtccttcttgatgtcctttaccagcatcaagagatatgattttaaatcagagtcttgctttttgggtgtgttggggtatccaggactggctgaggtgggagtgctgggttccgatgatgatgagtggtcttggtttctgttaataggattcttacgtttgccttttgccatctggtaatctctggagttagttgttatagttgtctctggtttgagcttgctcctcctgtgattctgttagcctctgtcagcagacctgggagtctagctctctcctgagttttagtggtcagagcactctctgcaggcgagttctcctcttgcagggaaggtgcacacgtatctggagttcagacttgccccctggctgaagatgaaggcctgaaacagggactttcccagaagatgtgtcacttctgcctgcccctgaagctgtgtagcttctgtagtctgcactcttacctgtgtagactagcctctgaggaatcagggacccaagatggctcccccagttgctccatggcagagccctcctgggcggggtgtacacctctcctctgttggggaaggtgcctgaatgtctggagcctgaaacggggtctgtcccagaagctgtgtagcttctgtagtctgcactctcacctgcacagactactctctgagggatctggcacccaacgtgggtctagttttattactttgtatgtgtatagcaatttttcacagcaacatttgttgatgatactgccttttgtcagtgtgtattttagggaactttgtcaaatgtcagctggctcttattacacttattatttggctcttctatttttatgcctttgaaggccttatatgctaatatcaggaaattttaggttgactgactattgtcaatcggattgagtcctgaaggtcagaacttgatgagtgggttaagccatacctagcacttgcaattgggttaattctctttatcccataatagggttgggttagaaatggtacctcaaagaaagacatggaattttctttgaggggcctatgggtgttgagtagataacccataactatttactgtactagtatacagggttgtttgaagatgcaatgcaataaaggatgtgaacacaacattgttgattatataaatttacacaacattgtaaattgatggataccattagatttatttggttagtgttatatatttcacaggattagatatgtgctgagattgaaaagttacatattaaaataattaatttttataatttttattatatttgtaccctttcataatagagaaatattaagttctctttatctttcaattttaaaaacatatctacagtctagatccaaaaacaaacccatctcacagccatccattggactgagcacagggttcccaatgaaggagctagagaaaggacccaaggagctggaagggtttgcaaccccataggaggaacaacaatatggactaaccagtacccccagagctcccagggagtaaaccaccaaccaaagagtacatatagtaggactcatggctccagctgcatatgaagcagaggatgacggcccttggtcctgtgaaggttatatgccccagtgtaggggaatgcaaggaccaggaagatggagtgggtgggttggtgagcggggatgtgagggggtaggggatgaagtgaggtgggggaatgggatgggggttttaggaggggaaaccaggaaaggggataacatttgaaatgtaaataaagaaaatatctaataaaaaaacccaaacccacagaatgtatattagaaatgttattttaggtccttttcaaagtatcatgttaggaaacttctttttaaaagaagtattccttttatttacttttattttaaatatctattcacctacatttagcacatagccttgtttttagttttagctggaaaacaacttttttcatacagtggtcaaagactactacttgttttgatcacattatatagaatgatgaatgacattcaatgtcagccactaaaaatgtgattttgaaccctcttaaaagtgatctactgtacaatagacaaattatgcttgatttgaatagtagctaattattaactgagagatgattgcctcaaccacaacaaaaaccatttcagcgagttcactgtggagacatgatggtgcccgggatgtggtttgtagtgggcaccaaatattttgtagtttcaaagctataaacttttaacccttgtcataaaattcttttgattttctcttagtcttaatatgatttaatgttgttcactctagattgtctaatgtcagcatctaaatactgtgtccttagatgatattggtaaagagcaaggaagtgggtgtggatgtggttccaattactctgctgctcttacccttctgttgtggctttcagaaatatcttttgtaagtttaatatccttcctgtacgtaattgtaaccaggcttccttaattattctatagtgagttagtgttttagttcctcagttatttacatagatagagcattttgtcacttttgatgccatgatcttcccacatatttgaatgttgttcatattatatgttcctaaacatattaggattcataaaagtttaactcattgtagtagaattttttgcagtaactttccaaattacagacaagtacactcctgtgaaatttatcattttgttctacacttgtgttttgtaatgttcaaaaagttttgtagtttgtcatttttttaaaaaagttaattctattgaagtatatactttataccataaaattcactttaaaagtcaatttaatggtttttaatgaatttacaaaattacaaatctaccactacaaatcaaggtttgaagtgaatattcatataataatctctggttttatgagtccagagcagacctgttttgagttggggaggggaccagagctgggctgattcagaattcagggcttatttgaatgtctgttaccctaggaaaatgacatttatggattttttttaataaaatacttaaaacaattgtgtaactgcattgatataaagatgaatacaattcattattttgcttgctgttgttacattcactttttaaagaaagaaattaaaaacatttttatgcccctaaagtactttgggtatcagacattatgtctcttgtaactaataaactgcttctgggagaatcatgataagaaatttgtattgtaattacttatttgtaaacttgacaaataaatgaggtgaaaaaaaattctgtgcattcaggaaggaactagagctaaaaacaggaattctgctgaggtgcaggtagggcactgaggtacagaagcacataattgtggtgagggaagctgagacagtgcagtagggaaagaaagagcagtgacatcagaaagttcaaaagttcagcaacagtgatctggaattttattatttcttctaagaggcccattgcattcttgctttgaagaccccatcaatccttgcatatctgttgtccatttttgtaattagatttattttttaaaatttatatgtatgtattgtatttacttaatttccccctaattcttgtctttccaaccctcccataccttcaacccccacttcctctcaaattcatggtccttttttcctttattatcattacaaacacacatacaacatacacacacatttctgtgtgtatactggtgtgtgtgtgtacgtgtgtgtgtgtgtgtgtgtgtgtgtgtgtgtgtgactgattacattgttttggatgaacaattagggagcttgtccccgggagaatattaagtctcctttgttcagctctgctaattgactagagttcatcgtttacacattcattttggcatgtcaattggtgttgccattactcaggtttttctttaagcaagcatattgttgaaatttcaaggaagtagctaattggtaatatatagaagacactactttacagcagacttcatggtcctctggctcttaaaatgtttctgccgttgtgttgtagatatattggcagaggctggtcaccccacagtcagttcccttactttctgtaattgtctcctgttgaaaaacatgtttcttcgatgagggctgagatctacatttatctgtgggtaagtattttgaatggggtaactgcagaaactatgacagcaaataggccatgtggacggaagggatgggaccctaaagaggaagaagatctggctacaagagataagaagcagggaatggaacaaactggtgcgtttaaatcttagctcacattcctcctgtgtttgcagcattgttttatgctttctgtgattaaccccccacgcccccaccctgttttaagcttgggttatgtatgagtgctgacatttacttcctgttctctttggcttttaagatttgacaatttctatttatataaaaaatgtaggaattacactaagcctgaaggctgctaattattttaacaatagtaattcttcaaattaataaatatgggcatttgtttgtttctttttcaatttctttcattagtattaatttttccaatgaacgaatatggccatttgtgtctacctttttttcaacttctttcatcaatattttatatttttacagtgtatgtgtgtgtgtatgtatttatgtttttggttgaatttattctcaaaatattttatttgtttattcttattaatcataaaatattttatttatgtatttattcttattaatcatttcattcatttacatctcaaatgatatcccactttcggttacccctccaccaaccccctcatcccacatctgccctccctcctcccctttgcctgggtggagtgctcccccacccacccacactcatcctcccactgctccagcatccctatattctaaggcatcaaacctccatgtgaccaggggcctcccctcccattgctgtcaggcaaggccatcctctgcttcatatgtatctggagccatgggtctctccaggtacactccttggttggtggtctagaccttgggagaactgcgtggtcaggccagcctatgttgttcttccaatggggctgcaatccccctcagctcctccagtccttccgccagctccccaccaggttccctgagctcagtctgatggttggctctaagagccaagatattttatttttaataatatgtgatatcatgttcttgttttcttttcaagacagttactaacgggattctgtgtgtgtaaattctatatataaaatcatgtctgcaaatggagagttttacttctttctatttttacttagaagcttttgatttctttctgcctaattaccctttccaggattgctaatattccattgaataaaggcattcaggtcttgtttccaatcttagagaaacagctttacatttccctgtaaattactgttttactgtaggctagcatatctcaccttgctgcactgaaacacatttttcctagagcaaatttgtagagagtttttatcatgaaagaaattaaagttgacttctaccaaatgctctttatgcattgaccaagaagattatattttttcaattttttattagacattttcttcatttacaattcaaatgctatcccaaaagtcccttatactccaccgcccccccactggattatattatttttattcttcagtctgttaatgtaagcaaagctgtctggagcaaaaagaataagctagaaagcttatacttcctgattttaaagtatatttcaaagctattataattaaagttgtgtggtatatgaaaataaaagaaacacagaccaaagaagcaatataaaaccctattaataaaaccacgtattttgactcaattgatcctcaacagagggccaataaaatacaatggaaagaagtacagtctcttcagtaaatagcattagacctgctgaggcagagggactgctgtgagtttgaagctatgctaaggtacatattaagttcaaggcgaacgtgcattataaagtaagatattatcttaaatagcaactgcagcagcaacaacaaacaatgccctaagaacaaaataagctgtgttgagaaaagtgattattcatatgcagaacatgatattaggccgctttctgacattagctataaatactgactcaaaccatattaaggacttaaatagcaaaactgagtgcgaaggggaacaaacacgaacaaaatgtaaagatataagtagggataaaagccactacttaatatactcattaaaatttttatttaagaaggcctaatttgacaaacttaacaactatatagaaaaacttcttcccttgataatggctctttagacatgtccctaaacacaaagtaatgaaaatatatattaaaaaacaaaacaaaacaaaacaaaacaaaaagcggagaaatgggattacatcaaactagagaaagtttctacataggaaagagtaaatcgccaatgcagtgaatagataacctattaacggacaaaatctgcgcagaaatggtccatgtaataaaggatgtataagatatgtgaagaactaaacaatgcaatggaaaaactcaaacagatttttcaaactgggcaaaagatagggctagggggatcccacatgcgcttgccttggggctcaggctacctggggtggcaggacacctgaagttttgattgtgcttaccccaggcctgcgcctggcaggtgtagggctatgggaagccacaggacacctctccaggggtggggaagcgcagtctaaggtcccagggacagctggagctggctcgggggtcccaagcctgcaaggaggctcttgggcgcccagatgcctctggatgccactgaagtgctgagaacagagtgggggcctgtgggctgtatctagcccgggctgaaggagaaaggggcgctccaattggatcctgaatccttggtttgtcagtggctggcttgatggaggctgtctctgggagtgctaagaggccttttgtgggagattagactactgggagttttaggcaaaggcatgctccttgctccccagggtggatcccaatgaaaagaggtggtccttggttttaagacatgcattgtcatggcaggaagtagatgagtaaaaccttaccctacttcttaggggcgagcctgaggtttactaccttttgcagggagacatttctgggaaggaaagcataattggctaagcctccaagcctttaggtacctcattaaaatggagatctgtcttgaggctgaggctaggtgacttcagatcacttcctttgcctgtggtcgggcttggagcattgtccttacttgactgaagggcacaaatctatggagtgctgtggcctcatgccagagtcaggaaccaggtcactgggatttccagcctgtgctcgacccggaaccaggctgccattcacggtcctacagtgtgcaacacagatacaaaatttgtccaacataattatcagtgaaaggcaaatcaaaacatcaatgagatgtcatctttttaatgtttatacttcattatagctttcagatataccaggaacgtactgtgagaccttaattagctagagaatttagcaatgtggatgttatggttaattttattttgtaggtgactaggagtaattttaatttcaagtattaccatatgacatcctctaaatgttttttttttctattatggtaaaatgtaatatacttaatacattttaccttagtggttattatttatagccaattagttttgtatattcagatattcttagggaataaaaaattaaattacatggaatccatccatctacctgtccattcatccacccatttgtctatccacccaactgtagtagagagtttattaccatgcagaattttcattataattgaagatactgagaatatcagcaagaaacaagtaatgaattcacataagggaatgaatagcttgataaagtggaaggcttactttcattaattagataggctgattaagaaatattccagcaataggacaacagatacagagatctgaagcagggacaaaaatgaacgcattatagaaactaattaaatgttgaagtaactgactggtatacttcttgattttccataaaagaaatataaagcatcgttgaagatttagtatgatgatagttgaaactagagtaattcttcatagccactaactctgatcatttaataatgctcacctggaaaataaaaatagattctgatgtcttaaataaaattctatagttagtagattgttaaaagactggaccttttaaagatttaggattacataatagacttttatttctgggcagagaacctgtcagatttctagcatagcaactgaatcctgttgctgttttcatgaatggtaatagaaacagcaaagagggaaagtcgatggaaagctgctgcttctcagactgttgggaaactcatagtgagatgcccgagaaagctgtattgattaagggcatcatcctagctacagtacaggggagtgctgtcactttgctgacctactatgttgtgtaacataagttgttttcatcaaagctatattattgtgacttaatatcttttaatgacttaaagtacaatatgtataatatttacattgtacacatagtatctaacctttttataaaactttaccagttgtactcacagcaatgtagggattgagccagagaccatactgcctatcttgtctgtcccttaaatgcattaaaaacctctaagtatttccatgtatttagtcctatagatatttctggatgtctggagccaggtctgctgtcattcctgaagctgcataaaattattggggggaactcttataaaaggaaatgtatataaagttatgaagctgctagaaatgcatctaatcctggtagccctatattgattttatcatgaagaagtttttttttttccttttgggtttcttcttttttttttttaaattttttttattattacatattttcctcaattacatttagaatgctattccaaaagtcccccatatcctccccccacttccctacccacccattcccattttttggccttggcattcccctgtactgggggatataaagtttgagtgtccaatgggcctctctttccagtgatggccaactaggccatcttttgatacatatgcagctagagagtcaagagctccggggtactggttagttcataatgttattgcacctacagggttgcagatctctttagctccttggatactttctctagctcctccattgggggccctgtgctccatccaatagctgactgtgagcatctacttatgtgtttggtaggccccggcctagtctcacaagagacagctatatcagggtcctttcagccaacgcttgctagtgtatgcaatggtgtcatcgtttggaggctaattatgggatggatctctggatatggcagtctttagatggtccatccttttgtctcagctccaaactttgtctctgtaactccttccatgggtgattgtttccaattctaagaaggggcaaagtgtccacactttgatctttgttcttcttcagtttcatgtgttttgcaaattgtatcttatatctcgggtatactaagtttctgggctaatatccacttatcagtgagtacatatcatttgagttcttttgtgattgtgttacctcactcaggatgatgtcctccagatccatccatttgcctaggaatttcataatttcattctttttaatagctgagtagtactcctttgtgtaaatgtaccacattttttgtatccattcctctgttgaggggcatctgggttctttccagcttctggctattataaataaggctgctatgaacatagtggagcatgtgtccttcttaccggttgggacatcttctggatatatgcccaggagaggtattgcgggatcctccggtagtactatgtcccattttctgaggaaccgccagactgatttccagagtggttgtacaagcttgcaatcccaccaacaatggaggatggaggagtgttcctctttctccacatcctcgccagcatctgctgtcccctgaatttttgatcttagccattctgactggtgtgaaatggaatctcaaggttcttttgatttgcatttctctgatgattaaggatgctgagcattttttcaagtgcttctcagccattcggtattcctcaggtgagaattctttgtttagatctgagccccattttttaatggggttatttgattttctggagtccaccttcttgagttctttatatatattggctattagtcccctatctgatttaggataggtaaagatcctttcccaatctgttggtggcctttttgtcttattgactgtgtcttttgccttacagaagctttgcagtttcattaggtcccatttgtcaattctcgatcttacagcataagccattgctgttctattcaggaatttttcccctgtgcccatatcttcgaggcttttccccactttctcctctataagtttcagtgtctctggttttatgtgaagttccttgatccacttagatttgaccttagtacaaggagataggaatggatcgattcgcattcttctgcatgttaacaaccagttgtgccagcaccatttgttgaaaatgctgtcttttttccactggatggttttagctcccttgtcgaagatcaagtgaccataggtgtgtgggttcatttctgggtcttcaattctattccattggtctacttgtctgtctctataccagtaccatgcagtttttatcacaattgctctgtagtaaagctttaggtcaggtatggtgattccaccagaggtacttttatccctgagaagagtttttgctatcctaggttttttgttattccagattaatttgcagattgctctttctaattcgttgaagaattgagttggaattttgatgggtattgcattgaatctgtagattgcttttggcaagatagccatttttacaatgttgatcctgccaatccatgagcatgggagatctttccatcttctgagatcttctttaatttctttcttcagagacttgaagttcttatcatacatatctttcacttccttagttagagtcacgccaagatattttatattatttgtgactattgtgaagggtgttgtttccctaatttctttctcagcctgtttattctttgtgtagagaaaggccattgacttgtttgagttaattttatatccagctacttcaccgaagctgtttatcaggtgtaggagttctctggtggaatttttagggtatcttatatatactatcatatcatctgcaaagagtgatattttgacttccttttttccaatttgtatccccttgatctccttttgttgtcgaattgctctggctaatacttcaagtactatgttgaagaggtagggagaaagtgggcagcctttgtctagtccctgattttagtgggattgcttccagcttctcaccatttactttgatgttggctactggttttctgtagattgcttttatcatgtttaggtatgggccttgaattcctgatctttccaagacttttatcatgaatgggtgttggattttgtcaaatgctttctatgaatctaacgagatgatcatgtggtttttgtctttgagtttgtttatataatggattacgttgatggatttccatatattaaaccatccctgcatccctggaataaaacctacttggtcaggatggatgattgctttaatgtgttcttggatcatgaagaagttttacacacacctaaacactgtgcattttaggtgctacaaccctataactgaccaaatgccattaattgacacctgactatcataattcatatttgctagaagaatagacatgttccttctatcattactgattttaataacttgtttatctttttccttggtgagcttaatttaagacatattcattttgttgattattttaaaatgtttttattaggacttattaattgtacctaataatgggtttcatgtgacattttaatataatacatattttgatcatattctgtaactttaattgttttgaaacccacttttaatgatgcaactcaaatgctttaacctcccttcttgtctatcacccacaagaggtagtggaaaagaaagaatacaggggaagtggacctgttttaaaggttctctccatttagtttgatgttagctattggtttgctgaatgttgcttttattatatttatgtatgcactttgaattcctgctctcttcaatacttgtaacatgaaggtgtgttgtattttgtcaaaggctttttcagcatctaatgagatgatcatgtgtttttttccccctctttgggtttgtttatatagtggattacattgatggatttctgtatattgaactatacctgcatccttaggatgatgcctacttgatcatggtaaatgatcattttgatgtcttcttggattcagtatgcaagaattttattgagtatttttgcatcaatattcatgagggaaattggtctgaagttctctttctttgttgggtctttgtgtgatttaggtatcagtgcaattgtggcttcatagaacatattggatagtgttccttctgtttctattttatggagtagttgagaagtattggtattatgtcttctttgaaggcctgatagaattctacactaaacccatctggtcctgggctttttttttggttgggagacttttaatgacttcttctatttccataggggttatgggactgtttagatggtttatctgatcctgatttaactttggtatctgccatctgtctagaaaatcatggttttcatctagattttccagttttgttgagtaaaggcttttgtagtaggatatgttaatttttggaatttcttcaggttctgttgttatgtctcccttttcaattttgattttgttaattaggatagtgtccctgtgctctctagtgagtctggctaagggtttatctatcttgttgattttctcaaagaacctgctcctggtttggttgattctttgtataattctctttgtttctacttggttgatttcagccccgagtttgattatttcctggcattctactcctcttgtgtgtatttgcttctttttcttctagagctttcagatgtgctgttaagctgctagtgtatgctctttccactttttttttattggatgttttctttatttatatttcaaatgttatcccctttcctggtttcccctattgaaattccctatcccatctcccctccacctgcttctatgagggtactctcccacccacctactactgcctccctgccccagcattcccctacattggggcattaagccttcacaggaccaagggcgtcttctcccattgatgcctgacaaggccaatctctgctacatatgtggctggagccatgggtcactccacgtgtactctttggttggtggtttagtctctgggagatctgggtgggtgggtggagttctggttggttgatattgttgttctacctaaggggttgcaaaccccttcagctccttcagtcttttatctaactccttcattggggaccctgtgctcagtccaatggttggctgtgagcatctgtctctgtatttgnnnnnnnnnnnnnnnnnnnnnnnnnnnnnnnnnnnnnnnnnnnnnnnnnnnnnnnnnnnnnnnnnnnnnnnnnnnnnnnnnnnnnnnnnnnnnnnnnnnnnnnnnnnnnnnnnnnnnnnnnnnnnnnnnnnnnnnnnnnnnnnnnnnnnnnnnnnnnnnnnnnnnnnnnnnnnnnnnnnnnnnnnnnnnnnnnnnnnnnnnnnnnnnnnnnnnnnnnnnnnnnnnnnnnnnnnnnnnnnnnnnnnnnnnnnnnnnnnnnnnnnnnnnnnnnnnnnnnnnnnnnnnnnnnnnnnnnnnnnnnnnnnnnnnnnnnnnnnnnnnnnnnnnnnnnnnnnnnnnnnnnnnnnnnnnnnnnnnnnnnnnngtattttgcttccccttctattaaagactgaagcttccacactttggtcttttttcttcgtggacactgtggtccaattcttttatggaggtactcagagctatgtgttttcctcttagcactgcttttattgtgtcccataagtttgggcatgttatgcctttatttttattaaattctaaaaagtttttaatttctttccttatttcttccttgaccaagttatcattgagttgttccacttccatgtgtatgtatgttccatgtgtgtgtatgttccacttccatgtgtatgtgggctttctgtggaaaggctctttggagcagatcccatctgcattgtcagaaaatcagcagttcagttgacaggtcagtagctcagtccacttgcaaacacttcacagatacaccagcagtccaattcagtagtgctggaatagcagcagcagtgggatgacctagcaggaacagctaggcctcagctgaattggcatgattcagcaggagggactggactagccccgggatgccaagagatgttctctgccatgcctctttcaactaagtgaatatcagtgctttttttctttttctttttctttttttcctttttttttgtggtgcatgcctttattagtttttatttgttattttatttatttacatttcaaatgttatcccctttcaggttagtttcccctctgcaaacccccagtctcattctcctccccctgcttctatgagggagcctttccatcccccttccttcctcaccaccctagcattcccctatgctggggacatagagcctttacaggacaaagggcctctcctcccttcaatgccagacaaggccattctctgctacatatgcagctagagccatgggtccctccatgtgtattctttggttagtggtttagtccctgggagatctggggggtgggtcaggtctggttgggtgatattgttgttcttcctacagggttgcaaacccctctggctccttcagtccttgcccctaacttctccattggggtccctgtattcagtctgatgtttggctgtctgtatctgcatctgtattggttcggctctggcagagcctctcagcggacagccataccaggctcctgtcaccaagagcttcttggcatcagcaatagtgtctgggtttggtgtctgcagatgggataaatccctatgtggggcagtctctggatggcctttccttcattcagtctctgttccactctttgtccctgaatttcctttacacaggaacaattctttgttaatatttgtgagatggatgggtaggcacatttctcaaccagggtccttgcctatctactggaggtggtctctacagttttttctctcccctttattgagtatttcatctaatgttatccctgttgggtcctgggagcctcttgctttcctggcatctgttgagtgtgttttatactccttcaaaacatcacatgtcttccatgggtcttgtcttatcacattccttgcctcaggacttgcatctgtgtcagatgacatcactctgtcaatcagtctgagtcaataaaaacagctgcagcacacgaccagaaaaatttcggtgtgtttttctctatggagtcctggcaaatgcagctcagctgtgcagtgtaagatgtactaatatatgtgtgtagttagtgaagaatccttcatcacatgtgctttcatgtgtttgctttagcagaacatcctttcatctgtgtctgcttcagtgaaacattccttcatgtgtctgctttagcaaaatatcctttcacttgtgtccacatcaggaaaactctacttcatgcatttgccccagcaaaacaccatccaacacaattgactttccaaagaacccttaaatttccacttcaatattcatctctggaattttattgattcttttcagtaatttccttgatttttcctattgttttcctatattctattttatttacttctattctttttaaaattaaaatttaagttaacatacaaaataatggtttcattatggcctttttatatatcgttgtcacaaactttgttttaatttattccctgtatctcttgtttctgttactttcttctagttttggagtttacttactgttcctttatcaattccttcatgtagaattcaagggctatggatctgagacatatatagaaaggtaggcattttcagacataaatgatataaatgaaataaagaaacaatttcctggcagtgctttcaaataaccccgtaatttctcctttgatctagtggtttttatagcatgtattatttcttttaccccaaagtgaatttccaaaatagtctaatatttttaaggacttattttactcactgtaactagaagctattctgtggatgattttaatggtttattttattttattatcttattttttgcccaacaaatggcatatgctataggatgctccgggtatacttggaaagaatgtgcacttttctatttttgagtcttatattgctatctgttaggatttgttgatttatgtagtaacattgtatttaacatagcaaggcaattttttgaaactgcctgcactgtttggtaaaactacagacatttattaatttttctgtttttccatatatttgacacttgctgttttctgctttctttactcactgcattctctttcaactcaggttatcgtgggaatggactatgcctgttgtacttgcgcccactccccttcatctctttaacaaccctttttcctttttctatttctctacaatcacaaagaaaacacagtatcttccttttgtgttctaggaaaaattatttattatgcatgtgtgtgtgtttgcatggttgtgtgtctatgtgtgtgtatgcatgcatgtgactgaagagaggtcagagaaagctattggatctgatagaactgtagttacaggtagtcttgagatgctcaatgtgggtgctgggaactgaactcaactcctcctcaaaggagcaagagctgagccatctcaagtccttgcttttgaaattttatttatttacttatttgtttgtttgtttgtttgtttatttattgctagctcagttctacttctgccctcagggttttcaggcaccaaccagaatgaagattctccaggtgggatgggttcacaggaatttggttggctttagtgaaggggaaaaccagccagccttctctgacatgcttttcagtgaacatttctcttttattgggggtaacaagggttatataaaccttggggaatgggtaggtggttttcgaggtgaacatacattattagctagtgtcaagatgcttcatttatatgaagagaaattccagatccttgctagacatgtccttataggaagagaggaagttaaacttataatttggacaccaggctacatgactatttcaagggtagtggagatggggtcatacaggctagttgtgagggagcatgcagacacagggcaaggagggaatagtcctaactcctatgggtctcaggacaagattttgggggattggatacatcctgaacttactcttgctccgtccagtcttctcccctggtcacatggctttctggcctcacaattcatgtgtgtgtttgtgtgagagggcacatgtgccacagtgagcaaagtcagaggacattttttaggaaggagttctttctccacaataacagtcctggggatagaactcatttctgggtttagtggtaatttatcccactggttaaacatcttaaagtatggtcacattctgagataccagggatcaattattaatttggggagaagagagacagatatttcaggccatactatgtgctcacttgcacttttttttctctttgtctctctgtctctctctcctcctcatctcacctcatcatgataatgatattgaaagatgaacttattctcaacatctgcggataggttccctttcatggtaaagatctattataggtttgattacattgaagactagaagttaatgggagccactatgatgggctttgacatgatgtaggtggaaggattggtcagtagtttggggtgtgtgacagaggatgcaaaatcctggagtgaactaagggatggagccatgtatctaagcaaagtcttcagcctttacaagttggaagatataagaaacagtcttctctgagagctactggaaggaactagccttgttaacacccaaacttgaactcatcgagaatgcctgtgacttctgaccttttgaattgttacaaagttagtttgtgtcattctaagtcattgggttggggaaatttattacagaagcaataagaagctagtttactacttagcactcactgggccttaggagtagaaggtttcagatgtcagttttggggttagttttaaagaactcctgctctattcaaataaatgtctatactatttctgattgaggctttatttggtatttaattttagaatgatgattctaattgatattttaaaatgtggtacttactttaatttcagcaatcttatattttaaagagattttaataggcatagtaaattagaacatcatttagacaattgctagtaatttcagcatatgaatctgtacatcttaagaatctataaatttgcattggatggcctagtcggtcatcaatgggaggagaggcctttcgtcttgtgaagattatatgccccagtacaggggaatgccagggtcaggaagcgggagtgggtgggttggggagcagggcagagggagggtataggggactttcagaaaggaaactaggaaggggattgtcctaccgtctccgaccagcagaaaagaagtgatgaaaccgatgtccttctcaaggcagtttattcaggaacttaacaatgtgcaggaaaaagatgctccgacctctctcggccatccccctttataccctctagtccactccccatcaccccagtccacgtaggcacagttcattggctcaggactacattcgtcacatcatccgtcgtggtgcatctgcgcaatgcagctcaaggtacgtgtccatcttgagggatatgaggaagtcaggtgccagtcataagacttggcagcagtcccagactccatcttggggccgcagccacacctgctcctcacaggggatagcattcgaaatgtaaatgaagaaaatatctaataaaaaaaaagagaaataaaagaatctatacatttgctcctgaaattccaagaacattgtattttcttggtagcatagtttagttttagtttaatcatttattcctgaaactgaagataagaggatagatgaagatttagacacattccaaggctttcttttaagaaatctgtaacaacataaataattatttggaatcatgtaagtcatggcatctagtccgaaattatgactttctgttcaacaaataagcctctaattcttttatgtctttgattctacagatgtcaagccaggccacgtggtaaaatcagttcaatcaccttttacctttagcttaatttatagacttcatctgaaatttgtactgcattgactaaagacatactttaaaaattctgacttcagattgtagtccaatgtgttcaaatatagcccaatggcaaagcacttaccaaatttccaggaagctctagatttgatagtcacagtgtggcgacaaataactaaacaaaccccatcacaccaaacattccaataaaacaatcattaaaaaagttcagtttctgaaaaatggcagataaccacaggcatagtgtgctagcatctccagagagttaaaagttggataacagttgattagaagaagtaatgatgggtggaggtctgtaatttaaagcaaactggaaactttataacagtattcaacaaggcagaagcatggttggaattacagtctcaggcaaacacaggtacagggtctaagcggtattcttgtcatgggaaggaccatggtgttagggacccattgaaaatggactcttgaggaacaacccaaagatgtgaacagtatttgtaacctgtcatatgaaagaacacctactgattggcacaaaatcaacctagggtatgtgattggtatcttagaacttgggcccatttatctctccttcatatttagtctccatttattttattttttaattattttttagatatatttatccactttagatcctgatggtgccccctcccccacatcccttctctcctcacagtcccaaccttacaaatcccttactcccattttccctttcccttctcttcagagaaaggggaatcctcctttgggtaccatcccatcctgggacatgcagttgcagtaggcctaagcacaccctttcccactgagacccaactaggcagtccatttaggggaagagaatccaatggcaggcaacagagtcagagacagcctctgctcctattgttaggtgatccacgtgaagaccaagctgcacatctgctacaaatgtgtagggagtctacatctagctcatacatgctctttggttggtggttcggtcttaatgggcacccatgggtccagcttagttgattttgtagatcttattgtggtgtccttgacactctggctctctgaattctatcccccactcttccacaagactcccccagcactgcctgatgtttgattatgggtttctgcttctgtttccatctggtgctgggtaaagcctctcaggagacaattcctgtctgcacccatagcagagtatcatttatagtgtcagggattggctctcatacatgggctgtgtctcaaatttggtcagtcattggttggccatttcctcaacctttgctccatttttaaccctgtgcatcttgtaggcaagacaaattgggttgaaggttttgttggtgggttgctatccccctccctccactggaagtcccacctggctacagagggtgaccacttactattttaaaaagtttatttacttgtattttatgcttatatgtgttttgcctgcttttatgcatatgtactacatgaatgcctggtatgcatggaggatattagagcccttggaactggagttatagatggtgtgagccaccgcatgtgtgctgggaactgaaccaagttttctgagagcactttacaggctctctccctctttaaatatacagtgtcatgttatcaggctagcttgaccttgatcatataatgccctcctcttttgtacatttttgttcatttctctttcattttttttcccacaaactcagacatttattggccttgattgtggggtcacggtgtttcagctcctaagagctgggactgttttaggttaagtgtatttatttcttcaccattctctcttctcattccacccttaactcaaattgcctcatatcacctttctgtacctacccttttccccttatcttctcttccttcctctaccttgttcattcttactcacaatagctaatgtcttatgtactttacttccttaaattattaggggctaggagctggctgtttactatatattattgctgtattttacactgtaatattcattgtttattcacactgtaatttgctgttttaaatgtactagagattgcatttgttgctgtgaatgggtgtctaccagagaaaaacaatgacaaattagcagtttatttacttatttgtttttaaatttatttatttattatatgtaagtgtacactgtagctgtcttcagacaccccagaagagggcatcagatctcattacggatggttgtgagccaccatgtggttgctgggatttgaactcagaaccgttggaagaacagtcagtgctcttaaccactgagccatctctccagcccacattaacagtttaattcaatggagtctacagtaaacattttaaacatatgcacagatagtggttaatgccccgcccaccaaattaccacccaataacctaacctcaaatatgcaagtctcattgcaaaaatacaagaaacacaagaatccaagataatattgtggcttcaaaaatgattaatctcaaagtaattgcttatgatgagagtgagttagaggcaatattagagaaataatttgaaagaatatatataagtatgttccaagaaacaaagtaggacaaaataaactattgaataaaatggaattggacttaaacaactgactgaaatagagaatcaacagcataataaggcaaaacaaatactagaaaaaggtaatttcataatgaggtattagaaatgaaaatgttaataagtcaaataaaatgctccacagaaagcctcagcaataaaatggatctggaggagtacagaatattatagcttgaaaacagagcacagaaattagaacattgaaataatgatgaagataaattaatatgttatagtacaataatatttatgaaaatgccaaacatacaaatcatgagcatagaaaatggagaataattccataatgaaagtcatagacaacattttaagttaaatcatatcacttaatttctgaaatgtagggggaaagctgcccttctagttattgggggcatttagaatattaaaaggataagactagaataaaacatctcattatcatattatactaaatactaatatacaaaacaaagaaggtttatcaaaagcttcaagagagaaatgctaagtgacatatcaagataggcccatcataataacagctggtatctcaactgaaaatttaaaagccaggaggacttggaatgacatatgttatgctctgaaagacaacaactgacaacaagactactatatgcagcaaaagtatttctcagaactgaagcaaaaaagaaaaatgttgacaataaaaacaggataaaggttttaatgaccactaaaatctattttacagaagataccaaagagaacaataatcacattcctgaggctgcaggaaggagtaaagatactatataaaggtagttatgtaaatcaccaataggaatatactaaataccaaaaatcaacaaaattacaggaataaatactcactgtaactctgaatattaatttctaaatcaaaatatacaggacagcagattgtatttaaaagcaagaactatctattgcctccaagaaatgcatttcaccataaaaaacagacagtcccttagggtgaaaggatggagaaatgttttccatgcagatgaacctaggaaacacagcaggtgtcactgttctagctgacaagatagaaagaggccaaaatcagtcagaaggaaatagagaatgtcactttctaccacttaatggaataacccaccaagaggacattctgattttaagtatatacatacttcactaaattttatgagcaaataatactataaataaaaacacagaaaacaccaacaatcaatagaataaatagtagagacctcaatattccactctcaccaataggttattacaacaaaaaataaacagaaatatttgagttaaatggtataattgaactaatgaatataacagatatatattggattttctatccaaatattgaagaatatccacttttaagcagcacatagaactttgtctaagttacattatgtaaaagaacataaaaatatgttacatataagaaaattgaacattgtctatgttctatatgaccactgtgaaataaaactggaaatcaacagcaaatgacatatacacacccatggaaatcaacatatttttggatgatgaatattgtagaaatcaataaagaaataaaacctccttgaactgaatgaaaatgaaaccacagtgcatgaaaacctatgggctatgataaagcaataccaagagagaatgctataggtataagtgtttacgttgaaaatcttagacagatctcaaataatattttaggtgcttagaaaaagaaacaaaataagtccaaccccaaatcaatagataaaaaggcctaattaactgaccctttgcctaactaatcacaaaaagatcagggccacacacattcactgatatattctaccagactctcaaagaattaaaccaaatataaccaaagggtgacagaagaaagaacataatagaccaatctgcttgatgaaccatgatgcaaatttcttctacagtgattttatttattcttaatttatgtgcacataaatgtgcttgcttgagataagatcgagaatgtagtaaagaattatcttatctttatacccacaataagccatttttttttacagtaagcgtagaccatcatggaaacacaactggacacaatacagagatggttgtatcatggggttctagtctccagtagatacatctgtatcacagcttggcattggtgaagatcagccaagggaacatcaagggaaagggggtggaaagactgtaagagtcagaataccaaaaaatttgctgtaaagtagtccatcctagaaactgctacatgaacaagactggaacaatggcaatatcagtgtaaatattaacatgggagggtaactaatgacctaaaagaagaaggaaaattagcctgtcttagtgatgagccctttattgtttactgaatgagcatttgtttatccagtgcgcattcctgagaccatatacacacaaataacaaaaatggactctgcagaacacacacacacacacacacacacacacatacatatatacaatacatatgtattacacatacatatgcaataattataatcaaagaacatgaggttatccacttgagggtgggtggggacatgtgaggaatttgaggaagagtacctggaagaagcaacaacatagagggctcagaaataaacccaccaggtacaggtacctgattttacaaagattgcaaaaatatacattggagaaaagacagcctcttcaacaactggtgctgtagaaagaggtatgtccatgtgcactaatgaaactagacccccatttctttttttttcttttttttttaatattttttattacatattttcctcaattacatttccatacccccccccccacttccctacccacccattcccatttttttggccctggcgttcccctgtactggggcatataaagtttgcatgtccaatgggcctctctttccagtgatggccgactaggccatcttttgatacatatgcagctagagacacgagctccggggtactggttagttcataatgttgttgcacctacagggttgcagatctctttagctccttggatagacccccatttatcactttccataaaaatacacacacacacacacacacacacacacatatatatataaaagattttaagaaccaaaactcttcaactgagaaaaaaaaaaggtgaaaaaccctttaagatttaggtggaaactaaatgtacaggattccaggaaataatgccagcagctgacaagtgggatttcataaaattaaaacagttctgcacagcagaggaaacagttaattaaatgaagacagaacttacagaataggtaaaaaaaatatctttgctagatatacatttgacatgagattaatatagatatacatttgacatgagattaatatttagagtatccaaagatctccaaaacgcaaatagtaaatctaataacacagaccaataaacacagccagttctgaaatgatgaaacaaatgtccagtaaacatgcaaaaccatcaaccttcctagcttatagccattagagaaatttgaataaagctacactgagagtctatcagttgggatgtcgatgattatgaaaacaaataaaatcaggtgtactggcttgaatgtggacaacacagaacgctcatacatagctgttgtgattgttaccttgtattgtccctatggaaatcaatacagaatttcctcaaaataattaaaaatcaatccatcaaatgaaccatcttataccattcttgggtggttacttcaagaactccagttagtatatcacagagattcttgtacaacaatgttaactccacaccattcacaaaagctatgttgtagaagcaacctaggtgcctaggagtagaggaattactagcaaatgcatgcataatcgccttttcagctgcaaataatgaaattccattcatttgcatgaagataggtgcagcttgagcaaatcatactaagaattaaatccggctcagaaaggcagatatgtttttatctcatttcttgtctcctagatttatatagactcaaaatcacatgtttttgtgacaagaaagtaagcaaacctgtccaggaaacttaagagaccagcaggaacaggaatcaatgcaaaagggagtaaggtaaaaataaaatgaagaaatactacatcatgaaatgaaagatgctgctgctacaaatgaaagatcctacatcatttgtaagccacttgacacaaatcaaatgacctgttaattttaggaatgactgaagtcaaatttacagtttatgacatctgtgtctcctgtgtcagcaccttgtgggaatggtgttgttcagatagacagtttgcttcaatatgtaaatattcccaaaatgttttaatgttgtaatgctacaaaaaattctctaacacacattattatgtcattgtgttatttagtggcactagtttagacacatattcagagcaataccatgagaattcgttttttatgaatgaagaatttacttagtaacctccctctctgtaaaacttcttagattgttttcttttctgtctttatgtagacacatttgctgatgtctttatatgcttactgtaatttaatcttttgtttttgtgtttttaaactacgtttagcatcacttatattagtgtgttagtctttttgtctccacagtgattaactgggtatgagctattttctttgttgttattgttaaaggtctcaagttgaatatgctgtgatagcagggaaactgaattcagtatcagggttaaaacttgttacttgtcaacaccagtgcttaaattttggttcactttggagacatctgggaccttcctgacactacagatgcctattccctatactcagagattgcgttttagtgcatgacctgggcaccgaggttggactcttcccagatgattgtgatagacagcaaagtttgaggatggctttccccacagtgattcatactctgtgctacttgagaatgagtcatctgggaatgcattaagaaagtagaattgtatgatttgtacaaagcagtattaggaggattcaggaatctgcattttgagatggcatcccagatgacttcatacagcaagcttgcaaggcacagtttttttttaaagtaacttgtcaattgtgtctcttcatgtaatgtgctttttgtactgttgtcctggggtgttgatattcttaaaatcaaatggcattaatcttagccccactaactgttgactcacacctgagtcattcttaccaaacgttcctgcttagtctacgggttagtcatggacaccatactttgtatctttgctttaaaaaccaccatgggacatttttttaaaaatggggatcataaaacacacagagtagttaagaaagaacattatatcatacgtgtactgatgacatgaaagtagaagtgagtgaaagaagaagtgagattttaatgtgaggctggatggtgaagaaaggagtgagcagggaatatgggcaatatgctgaaagtagttataaacttgtatgataatgactttgtaacactcaatactgaaaataatgaatatttaaatagttgaattaacaaaactaactgatgaatcttccatgaattccttacaggaacaaaatcattttcttttagttgtttaactcggtataaacattatggcgttggatgtaaactatttagaatttatttaagtaatactttaaatattccatgcatgagattttttttctttgctattagccatatccccttaatgttttttgtttttgtttttgttttgattggatattttctttatttacgtttcaaatgttttcctctttccaggtctcccctttggaactcccctatctgttccccctccttctgcctctataagggtgctccccacccacccactccagtccttaagccctggcattcccatacactgaggcatcaaacactctcaggcccaagggcctctcctcccactgatgtccaacaaggccatccactgccacatatgtggccagcgccatgggtattctttggttggtgctccagtccccaggagttcctgggatctagcttgttgacactgttgctccccccatggggctgcaaaccccctcagctccttcagtccctctctaactcctccatcagggacccctgagttcagtccaatggttggctgtgagcttctgcctctgtcttcgtcaggctcttgcagagcctctcaggagacagccatatcaggcttccatcagcatgcacttcccagcatccacaatagtgtccaggtttagtggctgtatatgggatggacccccaggtggggcagtctctggatggtgatgcatgagaattttaaaaaagcaactacctgtctatttagttgtatctatgcattgtttgtttctacccagttctctcgcttcataaagtcccatgactttcaatcatatgcttaattcttatactcgtgtgtgtgtgtgtagacacagtataatgtaacctgaatctgtctcaaacttgaacttctgattcttctgtcctcacctaccaagtgctgggattacagcatccagtgaatctgttgctggaacccagggctttgtgcaatccaggcaagcactctaccagaagaccatgcctccagattccattttctttggaagtcccgtaatttatgccactactggggcagggatgggggtggtggtggtgacaagtatagttttccttttttaagcaggtattttcaggcctcattactgactagctcctaatctcacagcatgtactaactgtagtatgttatgtgttctcattgagtgatgacctacttttaatattaataaatgatttgaatgatttcttgaaaatgtggcacttcactgggtactcggcaactcttcaagttactagtttgggttgatcttgtcaggatttatgtatttaaacaaaagtactgtgaaagaaatttaaatgtagtgttatctagccaaagttgtaaaagaataggtacgtgattgttatcacaagcttgattttatgttaaaattctggaatggttacaggaaatataggggcaagtgtctatcctcttatagatggatatgtgaatcagatatatgtcacatgcctcacctgttcatgtcgttgttgatggcactgtgctcatagctgcactagagatttttattatagctttattagtgagtttatgagttgttgagacatttttagtaacctgtcctgctgtttgcagattcgtgttgcctgttgtcatatacatattaagtatttatatttattagtattttttaatcaaacaaatgctttccacgtgaaataaaacaacagcatgttgggtatgtatgtgtgtacatgggtgtatgtgttcacataaatttatgtgttcaaatatatgtatgtattcacacttatgtgtgtatacaagtattgtgtgtttgtatgtgtatgtgactaagttagccttgttgttaaattaacttctttcaatttggagtcttctgctagcatctatggtgataactggaaccttggcactggcgtcaaagcacctagattacattattcataatctatcacacctctctgtttttctaaatacaatgagtctgtgcttcagtttccttagtggtaaatgccttagtttattatagtgtcagacccctagaattgatgtggacctagataagttaatatgctaagtgagcagtaaggatgaaggagtgtgagctttattatgttgctgttgtcactaatgtctcagtctctgttttgtccttcttgcatctctttgctctacactttcaccttattatttcttaactttgtgcttcctgccacagaaacctaatgtttgcagcatatacccaacccttacttttaatgaagggctacaatgatttagattatggacatcataaattcagagatttcctttaatatggaatgttgcaaagtcaagaaaacatgctgttataattttttgagcataggtgaatgaaaaatgtgggtgctatgtcacttgttaatatagtaattatattatgttagttacattattgttaattatatcattattaagtataattaagtatattataattgcattatattactaatataaatattaaaacctctgggtgatgtttagagtttaggaacacatataaagaagtacatctttgctggccaggtaccatgcacctgagaagaaaatcattgcagcctaagttgcaatatccttgagagagattctgaagtgcctgagttctatgcctttagcttcaagttgaggaaaattaatacaatgagaaaagacttgacagaagtcaagtatttattattggataaatgatattatttgttagcatttattattggatgcaggtaaacctcttacatctttgtttttttagttagtttgtttgagatggactcttatacaggttgacctggaactcacaatgtaacctatgctggcctcaaagtcatgattctcatgcctcaatctctaagtgctaggattatagacatctaccactactcctggtagccttatacttttatacttatagtcttacactcttgcaagcaatcttttcttttttcactttttcttttactgaaattagactcttttctcatacaaaatattttgattatagtttctctttcctctactcctactagttttttctctcctcccttcccttctggatccactccttttctgtttctcattagaaaagaacagctggggtccaggatccctcagagaccagtctgtgcaggtcagctcacagactgcaaagggtaggcgagcagactgcagaagtaacaggcacagcttctgggacaggcagaagtgacacagtttctgggacagacccctttcaggctccagacattcgggcaccttccccgccagaggagaggtgtctgccagggagggttcagcctgagtaggtgagggagccatcttggatcccaggtcactcagagactagtctgtacaggtgagagtgtggactacagaagctacacagcttctgggacaggcagagtgacacagattctgggacagaccccattttggggtccagacatccgggcaccttccctgccagaagagaggtatctgttggggagggctctgaccaccagagcaggtgagaaagccatcttgtgtcccatgtccctcagagaccagtctatgcaggtgagcttgcagactgtagaggcaacacatcttttgggacaggccctgttgtgggcctgcatcttcagccagaaggtgggtctgaacgccagatatctgcaccttccctaaaagaggagagcttgcctgcagagagtactctgatcactgagactcaggaaagaactagactcccaggtctgctgacagaggctaacagaatcacaggaggagcaagctccaaccagagacaactataacaactaactccagagattaccagatggtgaaaggcaaacgtaagaatcttactaacagaaaccaagaccactcaccatcatcagaacccagcactcccacctcagccagtcctggataccccaacacattcgaaaagcaagactcagatttaaaatcatatctcttgatgctggtagaggatatcaagaagggctttaataactcacttaaagaaatacaggagaacactgctaaagaggtagaagtccttaaagaaatacagaaaaacacaacgaaacaggtgatagaattgaacaaaaccatccaagacctaaaaagggaagtagacacaataaagaaaacccaaaatgagacaacgctggggataggaaccctaggaaagaaatctggaaccatagatggaaccatcagcaacaggatgtaagagatggaagagagaatctcaggtacagaagattccacagaaaacatgggcacaacaatcaaagaaaatgcaaaatgcaaaaagatcctaactcaaaacttccaggaaatccaggacacaatgagaagaccaaacctacagataataggagtagatgagaatgaagattttcaactcaaagggccagcaaatatcttcaaaaaaattatagaaggaaacttcccaaacctaaggaaagagatgcccatgaacatacaagaagcctacagaactccaaatagactggaccagaaaagaaattcctcccaacacataataatcagaacaacaaatgcactaaatgaagatagaatattaaaagcagtaagggaaaaaggtcaagtaacatataaaggcaagcctatcagaattacaccagatatttcaccagagactatgaaagccagaagagcctggacagatgttatgcagaccccaagagaacacaaatgccagcccaggctactatacccagcaaaactcgcaattaccatagatggttttccatgataaaaccaaattcacacaatctctttccatgaatccagaccttgaaaggataataaaggaaaagcactaacacaaggatagaaactacaccctagaaaaagcaagaaagtaatcttcaacaaatctaaacgaagacagtcgcaagaacagaatcccaactttaacaataaaaataacaggaaacaacaattactttttttttaatttctcttaacatcaatggactcaattccccaataaaaagacatagactaatagactggctgcacaaacaggacccaacattttgttgcttacaggaaacccatctcagggaaaaggatagatactacctcagagtgaaaagctggaaaacaattttacaagcaaatggtctgaagaaacaagctagagtagccattctgatatcgaataaaattgacttccaatagaaagctatcaaaaaagacaaggaggggcacttcatactcatcaaaggtaaagtctaccaagatgaactctcacttctgaatatctatgctccaaatacaagggcagccacattcattaaagaaactttagtaaagctcaaagcacacattgcacctcatacaataatagtgggagacttcaacaccccactctcaccaattgacagatcctggaaacagaaactaaacagagatacatggacactaactgaagttatgaaacaaatggatttaatagatatctacaggacattttattctaaaacaaaaggatacaccttcttctcagtgctacgtggtacctggtcacaaaacaggcctccatagatacaaaaatattgaaattatcccatgcatcctatctgattgccacagactaaggctgatcttcaataacaacataaataatagaaagccaaaattcaagtggaaaaagaacaaccctctactcaatgattacttggtcaaggatgaaataaagaaagaaattaaagagtttttagagtttaatgagaatgaagccacaacatatccaaacttatgggacacaatgaaggcagtcctaagaggaaactcataatcctgagtgcctccaaaaagaaatgagagagagtatacactagcagcctgacagcacacctagaagctctagaactaaaggaagcaaattcacccaagaggagtagacagcaggaaataatcaaactcagggctgaaaatcaaccaagtggaaacaaaaagaactattcaaggaatcaaccaaagcaggagctggttctttgagagaatcaacaagaaagataaagtagagggtacagggtcagtatccaaattaacaaagtcaaaaatgaaaaaggagacataacaacagaacctgaggaaatccaaaacatcatcaggtcctactacaaaaggctatactcaacaaaactagaaaacctggatgaaatggacaatttcctagacagataccagctaacaaatttaaatcagaattagattaatgatctaaatagttccatttcccctaaagaattagaatcagtcatcaatagtctctgaaccaaaaaaaagcccaggagcaaatgggtttaatgcagagttctatcagaccttcaaagaagacctaattccaactctcctcaaactattccacaaaatagaaacagaaggtactctacccaattcattctatgaagccacaattactctgatacctaaaccacacaaagatccaacaaagatagagcacttcagaccaatttcacgtatgaatatccatgcaaaaatactcaataaaattcccgcaaactgaattcaagaacacatcaaaatgatcatccatcattaccaagtaggtttcatcccagggatgcagggatggtttaatatatgaaaatccatcaatgtaatccactatataaacaaacttaaagacaaaaaccacatgatcttctcgttagatgcttagaaggcatttgatcaaatccaacaccccttcatgataaaagtcttggaatgatcaggaattcaaggcccagacctaaacataataaaagcaacatacagcaaaccagtagccaacatcaaactaaatggagggaagctggaagcaattccactaaaatcagggaatagacaaggctgcccactttctccctacctattcaacattgtacttgaagtcctagccagagcaattcgaaaacaaaaggagatcaagggggatataatttggaaaggaagaagtcaaaatattactgtttgcagatgatatgatatgataatatatataagtgaccctaaaaattccaccagagaatgcctaaacttgataacagcttcagtgcagtagctggatataaaattaactcaaacaaatcaatggcctttctctacacaaaggataaatggactgagaaagaaattagggaaacaacacccttctcaatagtcacaaataatataaaataccttggatgctaattgaggaagtgaaagatctgtatggtaagaacctcaagtctctgaagaaagaaattgaatatctcagaagatggaaagatttccaatgctcatggattggaaggattaatatagtcaaaatggctatcctgccaaaagcaatctacagattcaatgcaatccccatcaaaatttcaacttaattcttcactgagatagaaagggcaatttgcaaattcatctggaataataaaaaaacctaggatagcaaaaactattctcaacaataaaagaacctctggtggaatcaccatgcctgacctaaagctgtattacagagcaattgtgataaaaactgcatggtactggtacagtgacagaaaggtatatcagtggaatagaattgaaattccagaaatgaatccacacagctatggtcacatgatctttgaaaagggagctaaaaccatccagtggaaaaaagacagcattttcaacaaatggtgctggcacaactggcagttgtcatgtagaagaatgcgaattgatccattcttatctccttgtacaaagctcaagtctaaatgaatcaaagacttccacataaaaccagagacactgaaattaatagagaaaaaagtagggaaaagcctagaagatatggggataggggaaaaaatcctaaacagatcagcaatggcttgtgctgtaagatcaagaattgacatatgggacctcataaaattgcaaagcttctgtaacgcaaaagacactgtcaataagacaaaaaggccacaaacagattgggaaaggatttttaccaatcctaaatctgatagtggactaatatccaatatatacaaagagctcaagaagctggactccagaaattcaaataaccccatcaaaaaatggggtacagagctaaacaaaaaattctcaactgaagaataccgaatggctgagaagtacttgaaaagatgttcagcatccttaatcatcagggaaatgaaagtcaaaacaaccctgaaattccacctcacaccagtcagaatggctaagatcaaaaattcaggtgacagcagatgctggcgaggatgtggagaaagaggaacactcctccattgctggtgggattgcaagcttatacaaccactctggaagtcagtctggagtttcctcagaaaattggacataatactaccacaagatccagcaatacctctcttgggcatatacctagtagaagttccaactggtaataagaacacatgctccactatgttcatagcagccttatttataatagccagaaggtggaaagaacccagatgtccctcaacagaagaatggatacagaaaatgtggtacatttacacaatggagtactagtcagctattaaaaacaatggttttgtcaaattcttggacaaatggctgtatgtggaggatgtcatccttagtaaggtaaccaaatcacaaaagaagtcattaaatatgcactcactgataagtggatattagcccagaaacatagaacacccaagatacgatttgcaaaacacaagaaaatcaagaagagggaagaccaatggatggatacttcattcctcattagaatagggaacaaaatacccatgaaagaagttacagagacaaagtttgtagcttagacaaaaggatggactatccaagggattaccccacccagggatccatcccataatcagccaccaaacccagacactattgcatatgccagcaagattttgatgaagggaccctgttatagctgattcacatgaggctatgccagttcctggcaaatacagaagtggatgctcacagtcatctataagatggaacacagggcccccaatggagaagctagagaaagcacccatggagctgaaggggtctgcaaccctataggtggaacaacaatatgaactaaccagtaccccaagatcttgtgacactagctgcatatgtagcagaagatggcctagtcggccatcactgggaaaagtagccccttggatttgcaaactttatatgtcccagtacaggggaattccagggccaaaaagcaggagtaggtgagtattggagcagggaaggggaaaggtatagggaacttttgggatagcatttgaaatttgaaatgtatataaagaaaatatctaataaaaaagagagagaaaaaaaagaaaacaacagtcttctaagagataaccagtaaacatgacaaaatataataaaatgaagtaaaaattaccctatcatactaaagttggaaatggcaacccaacaggaaaagatgaatcccaagaacaagctcaaaaatcttagagaagcttgttctcatggtcaggagtccaataaggatatttagttaatatatatgcctggttcagacatatgcaggccctttgtttactgcttctgtctctgcgagatgagatgtttcttgctcagttgattaagagggccttgctcagcttttctagtatcttccatcttccctggatcttaaaatctttctgcctcctcttctgagtgatgatgccttaaccttcgagcagaatatttaatagaactcccatttagactcttttcacataatttctggctttgtgtctctttatcttttcccatcttctgccagtggaagcctgtctgataatgactgggtaagtcactgatctatgaggatagtagaatatcattaggagtcattttattggtatttttaaaaagatcagtagtgtttagttttactccatgctgttttgggcatgcattcccttttgtggagtgggccttaaggcaaatcagacattggatgtctacttgaacaaattctttacctaacctctctggatctatggattgtagcttggttatcattactcaatagctaatatccacttgaatacatatcatattaatttttttggctctgagttacttcacccagaatgatttttttttctaattccatccatttgcctccaaattacatgatttttttatgatgttatttttaaaaaacatctgagaagtactcgtgtaaatgtaccacatctatatccattattcttttcagtgacatctaggttgttccagtgtctagatattgtgaagaaagcaacaatgaacatggttaagcaagtgtccttgtgataggatggatcatcctttgggtgtaggcccaagagtggtatagcttgatcttggggtagatcaattcctagttttctgatattctgccatattgatttccataatggctgtacaagtttgcactcccaccagcaatggaggaatgttccctttctccacatcctcaccggaatgagctgtcacttgtgttattaatcttagccattttgtcgtaggtaagaaggaatctcaaggtagttttgatttgcatttctgtgatgggtaaggatattctacatttctttgtttctcagccagttggatcactctgtggagaattctgtttagatctgtactccatgtataaattggaattttttgatatctactttcttgagttcttaatatattttggatattagtactctattaatgtggagttgttaaaaatccccattttgtaggctgccactttgtttgaatgaaggtgtcctttgccttacagtatcttttcagtttcataaggtctcatttattaattgttgatcttagtgcctgtgctatcagtggtatgttaataaaatcttctcctgtgccaatatgttcaaggttattcctcattttctcttctatcaagttcactgtatctggttttatgttgaggtctttgatgtacttggacttgagttttgtgtaagtatggattatttgcatgcttctacatgcagacatctggtttgaccagcaccatttgttaaagatgctatttttattcagtttgtgtttctgggttctttgtagaaaatctggtgtttatatgagggtcaattttttttctgggtctttagttagtttccattaatcaattcatctgtttttttttaatgccaattccatgcagtctttactactataactctgtcatataacttgaaatcactaatggtgagaccttcaatagttttagctttcttttttgttgttgttattgttgtttggtgtgtgtgtgtgtgtatgctcacacatgtgtgcgtgtttccatatgaagctaacaactgtcatttcaaggcctgtaaagaattgtattgtgattttgatgtgcttgtcttgtatctgtagattgtttttggtaggaaggtcattcttactgtcttaatactactgatccatgagcattggagttcttttaatcttctgatatttgcttcagtttctttcttcaaagatttgaaggatttttttttttttttatgattttcttgagacagggtttctctgtgtagccctggctgtccaggaactcagtctgtagatcaggctgacctctaactcagaaattcaccttcctctgcttcccaaatactgggattaaaggcatatgccaccaatgttttttatcatacaagtctttcacttgcttggcccatgttacctcacgatattttaaattattccagggtattgtgaaggttgttgtttccctgatctctttctcagtctctttgttatttgtgtatagaaaggctactagttgttgttttttaaagttaagcatgtatcccaccactttgctgaaagtgattatcagctatagttttctctggtggaattttagggtaacttacataaactatcattttatctgcaaataaatatactttgacttctccctttccaatttgtatatcctttatctccttcacttgtcttattgttctagataagacgttaagtacaagaacgaatagatatggagagacagacaactttttttgttcctgattttagtggaattgatttgagtttctctccatttaatttgtagttggctatagatgagctgtaaattgcctttattgtgtttaattaagttctttgtatctcttgtctctccagaacatttatcatgaaggaatgtggataatctttacaagtttgagtttagccaggactacagagtgtgaagctgtctcaaaacataaataaatgattccagtctccatatgcacctgggagctaaggctgtcccacagccctttgcacccaaatcctgtccaggagagagttggtcttcataggaatgctggcacacttaagatcacatggtcacaggtccacaggagggacaaataccagtcagaaaaagcaagattatctaacaccagaggtaaccagatggtgagagggaagtgcaagaacctaagcaacagaaaccaaggctactttgaatcaaaactcagttctccctacacagcaagccctggataccccaagacaatgggaaagcaagacactgatttaaaatcacatctcatgatgatgatagaggactttaagaaggacataaatatctcccttaaagaaatacagaacacaggtaaacatgtagaagccattaaagaggaaacacaaaaatcccttaaagaattacaggaaaacacaaccaaacaggagagagttcttgttcctgtctttttcattatctcttaaataagcatatctgcctagagactatatgtgagtacatgactacagccaagggaaggatctagatactgatagctcctccttgtatatcacccaaatttctgttgtccttctgaaagcctccagtctagcttctggatggtatcctatttcctggaattctttctatataggatgggctctccccatctatatatctccctctttctccttccctctctccttccctctctctattcttccctccttctatcctttttccattcctcctttcctccattttcccaccttctctaggtgggaaatctagataaatctaggatagactatttaaagttaccctcattggtttgtgaattttgtatttgaatctgtgagaaaagaaccaacaactcaaatgccaggcagggtagtggtggcacactcctttaatcttaacaccagggaggaagaggcatatggagctttgagtttgaggccagtctacagaactagtcctaaggcagccagggctatacaaagactccctgtctcaaagaaccaaaaccaaatccaaaaccaaaactaaactaaacgaaaccaaaccaaccaaccaaccaaccaaccaaatataaaagagcacatatgtcgtgtctaggagcaggtttagtggtcattggactttctggaactctccttcctttcatttgagaatgaaacacttcattctcaaagatatcctcatattcccaaatctctaatttgggtcctgtcaacaaactcccctcaactctacctggaacttctctcaaactttgtgaagcacctttaagtgtgttttatgtacaaagatgttgaaaatcagaggcaagttttttttaaagtgcttaatacaacaatagttgatttctactgctactactaatgtatattaagaataatgtaaaaatatattagttgctttctttcttttttacaaagcacacagccttttcctcttgtccttcatttattctttctttttcttggcttactatccccctttcccttaatttgtctcttcctctctcatacccactcttcctccttatttccctctctttgtttttctttaatctctttgcttttttttctattgtaaaattgacatattttaagctatggtaaaatttcaagtatttgttatttataatatcttaataaaaaattacctcagtaagataaacccaataattggtatataggtttaatgagatgcagtagagggacagtacagttttatacatagtatagtgacagcactcatgatgtcaataaaacagagccatgagtttaagaattgatttggctacttgggaaggttctctccctcccgccccctgctgccctcactaccccccccaaatagaaaaagccataaaacccaatagtagtagaaactttgatattttcccattttatcctctcaaagaaatcctattgatgggaaaattttaggagcttttgttcttttttttcttcccccaaattacatcctgcatgtttgttcttgggactgtgaaagtggtttctcccactgctttttcttgtagtgggtagaagtttgcattcatgcctcaagggaagaagacagcagtgaaagcactattgtctttggaaatgcagacctacatagtagggctggatgagcaacaatcatctgtagaacccccttgatgtgacatgaaaggggattatcctgaccagattttaactagtttcatgttcagacattcttatagacagagtcatttagccagaggtttgtgtgggagaaggctctctctctctctctctctctctctctctctctctctctctctctctctgtgtacatttgagtgtctatgctttcgtaggttttaaaaaaaactataagttttcataagctctctataagcattcataaactctctctataagcttttcatttaactttaatttcttatttgagacagggactcattgtgattcatgctgtctagctctatataagactttaggcaaactacaaggtcttcatagtttttttaagcaatgtctttctcctggaaatacagatgcttagttttcacaccatgtgtgtacagttaaacaatgtacttttcctcaatagaacctatgctttgtttgtcttacctctcccaaccccagttgatgcatgttcattgtacataatactgtgtttcataaggtcatcctcatgcaagtgttgggtgtagtttgagcatttctgccttatctgtgctttttgtctcttctgccattagttcctttgttacagtttcacttctattctcaagtcatacacacatacatacatacatacatacatacatacatacatgagaaatcttctcagactaactttccactttatgcctagagatctatattacaatgttttgggtgctgatatagcagagtggttagaagagtaaagaggaatgacaaaggaaaagatggatattccatttgtccctagtattgaatttggatctgcttttccagacctttaattttcatgaagcataatggtccctgctctaaatttcacactaaatgcttgtttggaaagtgtatgactgtagtccaggagttgcaatttaaaatatttacatatgccaggcaggtagttaaaatgagtaaaccatgccagctaaagatgcataggaatgcgatgtacatggggctatacaacctgtcttagaagggtgcatcctaacgtgtctgggggactgtggtgcctatctgtgggatgcaagcaaggtcttgacaactgatttcatttaggaaagaagctgtaaatcatagcatttcccagtttttcttgtgtaacaacatatagctaactttaagcctttacctttagtttttgctaagaacagttagaggagatgagtcattggcactgggagcaagtgccatctgtctctggcacactagcccagcatagcaagatagcttttgaaacactgcttagcccaaacaagacactgacaaactaagtcatgtttatgaaccaccaattttcaaccttctggagttaattggtaatgtctgtcttagaaatctaattagaaatcagctttgctactttccatcaaagttttgatgtttactcaatggattaagtatactccccctccaaattatagtgcttcactagtgtacagataatttttttaaaaaggtaagagtcaaaggtccacaaattattctttgaccaataaaaaccattgcatttgtaatttccaatgttgactacctggtttggcatctgcttctgttagatggattgaatcagagaaaactgtaaaatgtaactctgtttcactgacattactaaatcatttatagtaaaaccttaatcaggcattttggtttgtatatctctgggcaatttatctttacatgataaacttgtatgacctttctttgagtattttcgaagtgtgctttttaatgctagtctggagccatacttacaggcagagtaaggccaggagtactttgtgaacttaggggtcagaactttgtgtgtattaaggtgtagtggaggagctgagttgagacagggttttaggactcatgagtcatggcctaaatttctttccaccaaactctctaggatgtcagaaagagacaaagatagtgtgcttttccaactgtaacagcttccgattgtggttacaacataagtggaagatatggctgcgagaaagattgtctgacgactatgataactgacacagcacagcagactcattcctaagggtttttaaaaaaatcgtattacagccctctaaatatgaaaacatacttgtggttatgtgaaaattcctatcatattcaaacattctgtcatagggacatatgagaatatggatataggatacagtgtatcatcaaaggctatgttggcgaacctttgaggtcccttagaggtgatgctgaaaagttcaaacatgtccacaattgcagcttagatcttcaaagcctcctggctctgttgatgaattctgactgcagtttctgaagtgaggggttttctctgtgaggtgtgtgtttatggtcagtcaatatgtgtagtgaataaaatatcctcatggtttctgtccctgtgaagtacctccctgatttgcaaatatgcccatcaatagcaattatatttgctaaagacatcatgtgtgtttgggccagtgagggttgaggtgtgaaaagaatgtacttgtgatgaaaacttaactctgggataagcagctgctcccaatcttgttgctacctgtaaactttccgtatcactaagtaatagaatgctttgtgtgtatcttcttactggacaataagaatctattacctttaaccacggtagttcagcacccagcacaatccctaaacagagtagccatccagtaagcatttgctgaaggaaagtaagatgcaagattagaaaatgttcaaagcaacaatatgaactaaccagttcccccggagctcgtgtctctagctgcatgtagcagaagatggcctagtcggccatcagtggaaagagaggcccattggttgtgcaaactttatatgcctcagtacggggaacgccagggccaagaagtgggagtgggtgggtgggagagtgcgtgggggagtgtgtgggggacttttgggatagcattggaaatgtaaattaaataaatacctaatttaaaaaaaagaaaatgttcaaagaaaacagaattaagtgattcaggatataaaannnnnnnnnnnnnnnnnnnntctctctctctcttacatacgtaaattctttgaattctttgttatccatttgcttatactaattaagtcaaatcttggcattatgttcctgcactccttgcatgactttttgtttgaggtgtaatgacctaacaaacacctatatgatatgctgaatcattttatcactgacatcatgatttcctgttttaatccacatctggtgttgtactttccctaaaaactcccatgagatcactttaaggactcattactaaggaacataaatatgtactgtagtctcccaagtcttctctttggactgggagccattccacagctctctgagtagtgtgcagtggccaggaaatgtctgcaccaactgctgggtggatcataaaaattatcttcagtggcttgatttaaaagccgttgttacgtgcagggttgttttgcactgttctgctttttttttttttttttttttgagacaaggttactctgtgtagttctggaattcactatgtagaccaggtctgctttgaatttagagatctgcctgcctctgccttctgagcacaggtattaaaggcatgcacttggtttacttaagagtttttagatggtgcctagattatgacatctttcttcatgaatttggggacttgcttgaaatttcactaaaatggattagctcctaggggtggcttcatggatgaatttgtcactgtgcctttggtgacttagctctatattccatctaatgttttgacactttcctcctctcaatgtcaatcttgatgtgggatttgtccttaaggcttcggcttcctgctgattttaagtccccttcattacacccactgcaatgcctctactgtcaatgtcttcatttaaaggctaatttctttttgtagagtaggattctcattcctgcctctaattcatttgagtatttggcttacattctatactgtttctcctttcccctttggtctctagataccgttctgctattttccaaactttataataacctgtatatttgttccctctaatttcccatctgggccatcactgtccccattcatctatcaactttctatttccatgtaacaaattaccagaaaatttatataaatatagcttagcataacacaaatttattatctcatagtgtctaagagagaggagttcaaaaatactttagttagatcttatacctagttctcaaaggtgcagtcctggtgtctgctggagtgtgattctcacctggtactcacaggtctctcccaacctcactcaggatgttggaataacatagttcctatgagatcctggaggctacattttttcagactaccaggacctcacattctctttacttctacacctcccttattttctcttgctatgttttccagacagtttcatttgtctgagctcaggtgattctcctacctaactctcacagttctcccttttattgaactcacagtaaactgagtactgacctgatcataggaccgacacctgatcagaagagaaaggggcatcctgacagagaggatttaaagagaagaataagaaacagaaaccttagtcaccatttttagagtccttcctaacataaaatccttgtgaatgctaccagatagtcaacagtaggtctctcctaacctcacttaggatgttggaataacatagttcctatgagatcctgtcactttaagatgctaatcatagagtatcattaatagtgtcagggattggttcttgccctcagtctctgctccatctttgtctctgcacttgtaggcaggacacattttgggtcaaaggttttgtgagtgggttggtgtcattatcatcatctgagagtcctgtctggctataggagatgagcacttcaggctccatatctcctactgctagaagtcacagctagagtcaccatcacagactccctggagcctccccaatctcagggtctctgcctctccctgctctgcctgccactgatttcctttcactttcttagccccctcttcctggttctccctacacctgataccccttcccgctcccctcccccactcagttccttcatctacctccaatgactattttattttctcttctgagtgatattcaaacatctttccttggtccctccttgttatttagcttctttaggtctgtagattgtagcatagttattctgtactttatggctaatatctacttatcagtgagtacataccatgcatggcctttgtgtctggattacctcactcaggttgatcttttctacttccatctatttgtctgcaaagttcatgatgtctttgtttttaatagctgaatagtattccattgtgtaaatgaaccacattttccattctttggttaaaggacatctgggttgtttaggtctctggctataatgaataaagctgctataaacatagttgagtaagtgtccttgtgggatggtagaacatcttttggttttatgcccaagtgtggtatagctggatctttaggtagaactattcctaactttctgagaaataccgaatttatttccagagtagttgtacacttttgcactcccaccagcaatagaagagtgttccccttgcttcacattcttgccagcatgtgctattacttgagcttttgatcttagctattctaatgggtgtaagatagaacttcagagttttttggtgtgcatttccctgatgactaaggatattgaacatttttttaagtgcgtctctgctattagagattcctctgttgagaattctctgtttaattctatactccatttttaaattgggctatttagtttgttgtgtttaacttcttgagttctttatttattttggatattagccccctgtcagacatagggatggtgaagatctttttccactttgtaggctgcagttttgtcctattgatggtgtcatttgttttacagaagctttttagtttcattaggtcctatttatcaattattgatttcagtgcgcaagctattgatgttctgttcagaaagttctctcctgtaccaatgcgttcaaggctactccccacttttctcttctattagatttagagttagtctttgatcaatttggacttgagctttatggagggtgttaaacatgtatctatttatattcttcagacatctatatgcagacattcagttagaccagcaccatttgttgaagatgatagcataactgtcctatgagatgctaccccagcatttaactgaaacagatgtagatatccagagccaaacattagatggagctctgggaagagttgagggaaggatcgagtgactcagaggaaatagggacttcacaataagaccaatgaaatcaactcatttggaccctcggaggaagtgctctcagagactgaaccaccaaccaaataacatacatgggctggaactaggtctcctgcacacatgtaacagaagtacagcttggtcttcatgcaattcttctaacaactgaagcagatgctgtccctgactctgttgtctgtttgaggctgccttgtctggcctcagtgggagaggatgtacctagttctacagtgacttgatgtgccagggtgggttggtacccagtggggccttccccttctcagaggagatggtgagggggaactgggaggaaagggagccatgattgagatgtaaaatgagtaaataaattaataaaaaatgctaatcacttcaaaagaccagatcctatagtcctgtctctgtgctatgtcttttgaaccactctcctgataattacaaggggaatttttaagtctgcctagtatctggagccatatagaataaccagactaaataaaatggtgtggtacttcctacaagttcaactaaaaacctataaataacaaaataagccctttggaggatttctctgaaaacttccttcttctctttggccctgctatgttttctgtggtagctatctcccatactctcctaatgaagttcttctgtagactttaaagagaagctcctattctcttcaaggtccatcatgccatctctgatatgatatactgtccccccacagttgtctcccactttaagcccagccatggtcttctggtcatgaggctttctttcctaataaagctcatctctgagggataatttcttgtcagctcttttcttcaattgctgcctgcagtctccttgacagacacaactcatataatctaatgctccaatggctggcttgtaagcaaccataggttttgccatttagacatactagcacacttttaaatcagtagaatccattaacagacaagcaatcaataatcctaacatcttccttcattaaaaaagccgggcgtggtggcgtacgcctttaatcccagcactcgggaggcagaggcaggcggattactgagttcgaggccagcctggtctacaaagtgagttccaggacagccagagctacacagagaaaccctgtcttaaaaaacaaaacagaacaaaccaaaacaaaccaaacaacaacaacaacaacaaaaacaaaaagaaagccatttcttcaagggaactcacattctgtctaacgttcaagctaaaagcattgaagtagtctgaagtggaaatttctggttgtgtcatgtgatgcagacacatgggatgttttgctaaagcagacttaagtgatgtttttctgaaacaagaccaatgagaggacatgtgatgtttgaaaggtgtataaatagggcccaacagacaatgactggggtgcttgcatgctagccttgcaatactttgttggtcttttgtctttgctgatcttcacttcattgagagagagacaaagtgaagagaggcacagcagagaactccttctgacattctggatggttctggctgttcccactgccttgtgctgattcagttgatgcctagctgtttctgctggattgtgctgattcagttgatgcctggctgtttctgctggattgtgcctctgctgccgatttgtctttggtgatactctttgaattgggctgttgatattctgactattgaactggactgatgatatcctgacaaatagaaactggaattcaccttctaaacaggtacatgtccacttgtcctatataccatcttttctcccatacctttgggcagtgggctagaaagggggattgaagtgtttgagatcacttcttaaagtgggctttgaaaaatctaagcctacagctccttttgtcttttctattctctatactttgctacgaggattgcaatttcttctccaaaacagcaaaacatttctgtagaaaacaataacactttggactccagtagcattcaaggaaatgtagaggccaacaggaatcagtttattaaccttcttagcttttgagctatctagtgatctcttatagaacctattactcaccccaaataaaaactcattctttcccaaaggagcgcctggtaaacccttagccagactggcttcatagaagatttgctttccctatccacggtctttagtctcatcatgagttcatttgtaacctatgagtcttgatccccaaagagtcccttgttctttaagcctggttctctcattagcctgaatattggatgtcagatcatgcccatgattctctatttcaacttcatgtgttgctctagtatataatgaaagaacaaaacatattatttgaccctggtgggaagaaccaaaatgtaacaaaagcaacaaatttcagccacccttgtgcttctgttgtagtcttccatggggattgtacccaactttgttgctttgtgttgaaataatatcttcaccagactcacatctcaatgaaaagaaaaccatgattctgtcacactttcattagtctttttaatagtcactggatgccaacattgtttctaaggtgttcctgatgctggagagagggctgcaaacaatggggccagaccttggcttcctgatgcttgtgttttggtggacagaggcctgaaaaaaataacgcctcattgagcgagctggaaaagcttcactgacatacagcatgagcttaacttgtacaccattgttccttctacgtcttgcttaggcttctgtgatttcaagtattcttttttttccattttcatagttcaatgaacttcatgcttagctagctttgtttttttctgttctcaacaacaaatcctttcttctttctcctcatttgctgtagctgctctccttcttctagatagtggctcagcagtacactgcctcccatgttcttctctttcattttttcaggcttcatttgtccattgtttttggaattatacttgctgctttatgacccctgcagcttttctttttttaaaaaattagttaattcatttatttacatcccaaatgctgccccttcctgtccccctcatagagttcctccttccatgcccctttttctgagagaatgcccccccccccaattatcccttaccctgtctcaccaagtctctgcagagttaggtacatcctctcccactgaggtcagtcaaggcagtacagctggtgaacagatttcacagtcaggctacagctttcgggagaacctctgctccagttgttggggaactcacatggagactgagctgcatgtctgctatgtgttggagcttctatccaatctgtatatgctctttggttggtggctcagtctctgagagctcccatgggaccaggttagttgactctgtgggcctatagatttcctatacactatagggccttcaatctttcccccaactcttccatggatggaggagtccctgagctacatccaatgtttggttgtagatatctgcatctgctacagtcagtttctgggtagaggctttcagaggatagttatgctaggcttatgtctgcaagcataactgagtatcattaatagtgtcagatattagtgcttgcccatggatgggtctccagttggactggttattggttggccattcctttaatctctatttcatctttgtcctgtatttcttttagataggacaaattttgggtcaaaagttttgtgtgtggtttggtgtccttatctctctactggaggttctacctagctacaggaggagttttcttcagattccatatccctactgctaggtatctcagctatggttacccacattgactcctggcaacctcccccacccctgctctctgagacttcttagagatttcatccccctgtagtagttgatagtcaattgcaaatgggtatcactccctttgatcattcaattcctagataaaagacacatacctttatatttataataagccttacttaataagtactagcactgagcagatatctaccatctaaaggattagaatctactttcccatccataacccaaaattataatttgccatgttccatctgggcaactcttaaatcaattggccagccctcattaccatcaattcatgacttacctaacccatggcatcttccatggcatcttctcctactctcacctctctcctcccacctcctggtcttctcagaccccaagcttgagaacccaaactctgcctatctctcttctgccaagctattggctgtaggcatcttgattcacaaatcagggataacttgggatggggcaaggttacttagcattatagtacagacactttttttctgtctaagtgcagattaatctcctccctgggggccagcatttagcactataatacagagcaaaagtccaaacctcaactccccaactctccaacagctgcagacttccattcattctcctggtcctgtagctctctatcttctctctccacacctgatccagaaaccccattctcatctcctctttcacccattttccttcctccctctccctcctatgactattttatcctctcttcgaagattcaagcatccttgcttgggccttccttcttgtttagtttctttgggtccatggagtgtatcataggtatcttgtactttttgactaatatccactaatcagtgagtacatgccatgcatgtccattgggtctgggtccattaactcaggataattattttctagttccattcatttgcctgcaaatttcatgatgtctttgtttttaatggctgaagagtattcaattatgtaaatgaaccatattttccatatctattcattggttaaaggacatctaggttgtttccattttctggatgttatgaatgaagtgaagcttgtgtccttatggtatggtgaagcatcttttgggtatataccaggagtactgtagcagggtcttcaggtaaaaatattttcaatgcaccttaatgtacaactgtgacatcctggtcattgaatacaatgctttgcttcccttttcatcctaattcaataatttatttattcattcaacaacacccatgaggtgcctattttagacttcactcatagtattacttccacttagaaagtccctttccttgtttttgcctgactaaatcttatcaaagggtcagctcagattcctctttttatctctttgattttgaaaatgttctctgtgactttcaatcttaaattttactcctcatttattgagtaatgacactgtcaagagtgcttactaaatatctgccaagtattaaaggaatcaatgaaaaaagctgttatatcactctcagtatcgttgttactgacactgttatacaaacatacattctgaggagttaagttattgaaaaaactcaagtaatatttgattaagatgtaagaagacacatcttaggaataaataagcacatggtaacactatgtgctgcttctccacatttttacttatttatcatatataacttagttgcttttaatcaccttttgcatcttttgattctctgagtcaatgattcatggtaagaaatatgtttgacatattattgtaaatgagtttttgaaatcttacctggttctgctataaggaatttgacatccagttccttcacatttgatcttgattcaaatgaattggcaaagttcttgtgtttattgaaaatctgttttttctcatggatttatatgcaaaataagcaccaatttgatttcatattactagtgctaacttaaagaaataggaactgtaaatgttccttttgttggactcaaagactgcaacaaagagggctttataatatggtttttgagtaaatcaaactgagatttgaaaattatgggaaaaatctattggatttcagtgtttacagactgaagccaaatcatacttatagaaaatcagagaactttgagtgagtactacactaagtattacataatcaattgtatctgggaagcttacctaaactatctaattggaaagatgctcaaacactatttcttctttttttcaaatatcatggtcctactagtaacaagatcattcagaaatattaattgtttggttctgtgtataatgtactattgaatccagactagctgagtcagacctggctcatccatttacttattaggcatgtaactttgggtagactactacactgctttgtgccttgtttttttcttttaaaatagaataatcatagtacttctttcataagcttactatgagaattaaactgataatgtgcataaacaaccgacattacaacaatgcagtacatgtgcttctattattactgagacctcaaactcaaaattagaagtatggcatgtataagtacaattcttatcccccgttttctgttgttgtggactgctatcttgaatataactgttaagcatcttaatcagaacagctgtgataatcaatgaagagacccttaaggttgggctgttgactttccctcataaaaggagggacagagtgggcattaggtctttacctaagagtccagctacttccttctgcattcgcattcactctcccatctgcatgtaattctgcctcatctcttcattgtctttggaggtccttgattaaatagacaatagaaggctatcttgtgtgtgttgtgtgtgtgtgtgtgtgtgtgtgtgtgtgtgtgtgtgtgtgtgcagttatagggaaatcaatcattatccatgctggattgagatttttgttaacacagctattttggagtcactaccattactgttagcaacctatcacctgtaagtcaaataagctcattgttttgccatagcatgtttgggtggctttgttactttggtctctctttgctgccttacttattgtaaagagaagcttcttcatgcaccccagttcttgtaataccttccaatgtgggttggctcaatatatattatctactcctaatttttttcatttttgttctgaaagaatcagttcttattttcttgtgagggatataagccagtcatagccattcatgcctgtattccagctttaggcagaactagaggcaggaggaataggagttacccagtaagcttaacatcagcttaagatatatgagctcaacaaaacaaaacaacaaccaaacaaaagaaatgaaataaaagatctaagggctagagtttgacatgcaatataatgctgataggatgaaaaaagatgccaggaactcaactctttgatagcagacacatttctctgtaagagatggattctttacaagtggtagcttttctacattttttataaatattatattttattctttgaaactttatataacatactgatcatatacatacctctatcataatataatttaaaattttaatagttccattattttcccttccttcttctttcttctaccgcttctctttcttagctctttccttctccttcccaaattcacagtgttcttcttttaaactatcattgttatatatcactattaataaataaacatataaatgcaatcaactgaatctgtttagtggtaccttcatgtatatattcatagggtcagccacctaatactggataaataattaggggctcatcattaaggatcattaattcttctctcagtttttaattacttgttgttcctcatctaggggtagggcttatgaaatttctgtcatctacattgggatatcaactagtactggaactgtttgcatcatgttttgactgccatgcagttgagacttcatgagtatagcttccctgccatagctagaaggcacaatctcactggagactttctggtctcctagcttttacattctttcttcctattcttcaaagatgtttcctgaatcttaggtagaggagttgtactgtagttgtccctagattttgactagttgttgctgtttgtaatatgcgaaagagagctcctttgatgaagcatgagatctatgcttatctttggatataaggataggtatttagaatgcagacaggaattatacttgtttatacctgttttagtatataacagatatttgtggtctcactacccatgggtagttagttaagattacagtaccaggcagatttcccctagttgaatgaaccttaagtctgattagaaagctgttagttgccctttctgcctggtcttttctgctggggaagactcctagctggtctgctcccatgaagacaccatattctgacccatcctagaggacctgctgcactcagagcagttggacaacagcttgactgttccactgaagacccaacagtctgaagacctcccaggagatctactgcagtcatgacaacagatcagtagcttctctgctcctgtgaagagacccccgttggaaggccccacaggtggtctgctacagccagggctataggcctactgggagacctgaagccatcagggacaaaagaggcagactccagacagtcatccagaccaacaaacaccagggatatccagatggtgaaaggcaagtgcaaaaccataagcatcagaagtcaatatatgtgggcatcatcagaacccagttctcccaacacagcaagtcctgaatgcactaacacacctgaaaatcaggaatctgtccgaaaatcctatctcatgaagataatagagtcctttaaggatgatatcaataacttaatgaaagaaatacaggaaaatacaggtaaacaggtggagaaattggacaaactgacctaagacctaaaagtggaagtagaaacaataaagaaaacacaaatggaggcaaacctagaagtggaaaaaagcatcatcgacagaatacaagagatagaagagagaatctcaggtgtagaagatgcagtaaaagaggttgaaacaactgtcaaagaaaattcaaaacataaaaaactcctaacccaaagtatccaggaaatttaggacacaatgaaaagacaaaatctaaggatagttagaatagaggagaatgaagattcccagctcaaaggacttgaaaatgtcttcaacaaaatcatagaagaaaatttctccaacgtaaagaaggaggtggccataaaggtacaagaagccttagaacaccaaataaatgggaccagaaaagaaaatcctctcatcacataattatcaaaacactaaactcatagaacaatgaaagattattaaaagccgcaaaggaaaagggctaagtaacatacaaaggtagacctatcagaattacacgagacttcccaacagtgagtatgaaagccagaagagcctggtcagaggtcatgcagactctaagaggacacaaatgccagcccaagctactatacccagcaaaactttcaatcaacatagatggagaaaccaaaatacaccaggataaatccaaattcaaacaatatctctctaccaacccagccctacaaaggatcctggaaggaaaactccaacacaaggaaggtacctgcaccaaagaaaggacaagatattaagcatctcatgccaaacccaaaagcagagagccataagcacataaagctacctacaaaatcaaacatatcaggaaccaacagtcatttttgtttaatatctctcaatattaatggactcaactcaccaataaaaaggcataagctaacagactggatacacaaacaagatccagaattttgctgtatacaagagacacatctcaataacaaagacactgactcagagtaaaaggatggaaaaaggtcttacaagtaaatggttccaggaaaacaagcaggagttgccatcctgatatccaataaaataggctttcaaccaaaagttataaagcttgatgaagaaggatacttcatattcatcaaggtgaaaatccactaagagaaagtctcaattctgaacatctatgccccaaatgcaagagcactcacactattaaaactttactaaaggagaggtttgtgcctcaggccccggcggcgggagtctccttggctccaggactccagggagggcaggctgcacaggtgaaggtgtggaatacagaggccagccgtttctgggacaggcgagagccagagagcttctgaggcggcgccatcttcggctccagacaaccggccaccttcctggccaaagcaacacagcttctgggaaagatcttgttttgggccttcatcttcagctaggaggaggtccaaacaccagataactgtgcaccttccctgaaagaggagagcttgcctgcagagactgctctgaccactgaaactcagaggagagagctagtctcccatgtctgctgatagagggtaacaaaatcaccagaggaacaatctctaaacaaagacaactataacaactaactccagagattgccagacggcgaaaggtaaatgtaagaatcctactaacaggaaccaagaccactcaccatcatcagaacccagcactcccacttcgcccaatccaggacatcctaacacacctgaaaaggtagacctggatttaaaagcatttctcatgatgatggtagaggacataaagaaggaagttaataactcacttaaagaaatacaggagaacactgctaaagagttacaagttcttaaagaaaaagaggaaaacacaaccaaacaggtagaagtccttatagaaaaacaggaaaacacatccaaacaggtgatagaaatgaacaaaaccatactagacctaaaaagggaagtagacacaataaagaaaacccaaagtgaggcaacactggagatagaaaccctaggaaagaaatctggaaccatagannnnnnnnnnnnnnnnnnnnnnnnnnnnnnnnnnnnnnnnnnnnnnnnnnnnnnnnnnnnnnnnnnnnnnnnnnnnnnnnnnnnnnnnnnnnnnnnnnnnnnnnnnnnnnnnnnnnnnnnnnnnnnnnnnnnnnnnnnnnnnnnnnnnnnnnnnnnnnnnnnnnnnnnnnnnnnnnnnnnnnnnnnnnnnnnnnnnnnnnnnnnnnnnnnnnnnnnnnnnnnnnnnnnnnnnnnnnnnnnnnnnnnnnnnnnnnnnnnnnnnnnnnnnnnnnnnnnnnnnnnnnnnnnnnnnnnnnnnnnnnnnnnnnnnnnnnnnnnnnnnnnnnnnnnnnnnnnnnnnnnnnnnnnnnnnnnnnnnnnnnnnnnnnnnnnnnnnnnnnnnnnnnnnnnnnnnnnnnnnnnnnnnnnnnnnnnnnnnnnnnnnnnnnnnnnnnnnnnnnnnnnnnnnnnnnnnnnnnnnnnnnnnnnnnnnnnnnnnnnnnnnnnnnnnnnnnnnnnnnnnnnnnnnnnnnnnnnnnnnnnnnnnnnnnnnnnnnnnnnnnnnnnnnnnnnnnnnnnnnnnnnnnnnnnnnnnnnnnnnnnnnnnnnnnnnnnnnnnnnnnnnnnnnnnnnnnnnnnnnnnnnnnnnnnnnnnnnnnnnnnnnnnnnnnnnnnnnnnnnnnnnnnnnnnnnnnnnnnnnnnnnnnnnnnnnnnnnnnnnnnnnnnnnnnnnnnnnnnnnnnnnnnnnnnnnnnnnnnnnnnnnnnnnnnnnnnnnnnnnnnnnnnnnnnnnnnnnnnnnnnnnnnnnnnnnnnnnnnnnnnnnnnnnnnnnnnnnnnnnnnnnnnnnnnnnnnnnnnnnnnnnnnnnnnnnnnnnnnnnnnnnnnnnnnnnnnnnnnnnnnnnnnnnnnnnnnnnnnnnnnnnnnnnnnnnnnnnnnnnnnnnnnnnnnnnnnnnnnnnnnnnnnnnnnnnnnnnnnnnnnnnnnnnnnnnnnnnnnnnnnnnnnnnnnnnnnnnnnnnnnnnnnnnnnnnnnnnnnnnnnnnnnnnnnnnnnnnnnnnnnnnnnnnnnnnnnnnnnnnnnnnnnnnnnnnnnnnnnnnnnnnnnnnnnnnnnnnnnnnnnnnnnnnnnnnnnnnnnnnnnnnnnnnnnnnnnnnnnnnnnnnnnnnnnnnnnnnnnnnnnnnnnnnnnnnnnnnnnnnnnnnnnnnnnnnnnnnnnnnnnnnnnnnnnnnnnnnnnnnnnnnnnnnnnnnnnnnnnnnnnnnnnnnnnnnnnnnnnnnnnnnnnnnnnnnnnnnnnnnnnnnnnnnnnnnnnnnnnnnnnnnnnnnnnnnnnnnnnnnnnnnnnnnnnnnnnnnnnnnnnnnnnnnnnnnnnnnnnnnnnnnnnnnnnnnnnnnnnnnnnnnnnnnnnnnnnnnnnnnnnnnnnnnnnnnnnnnnnnnnnnnnnnnnnnnnnnnnnnnnnnnnnnnnnnnnnnnnnnnnnnnnnnnnnnnnnnnnnnnnnnnnnnnnnnnnnnnnnnnnnnnnnnnnnnnnnnnnnnnnnnnnnnnnnnnnnnnnnnnnnnnnnnnnnnnnnnnnnnnnnnnnnnnnnnnnnnnnnnnnnnnnnnnnnnnnnnnnnnnnnnnnnnnnnnnnnnnnnnnnnnnnnnnnnnnnnnnnnnnnnnnnnnnnnnnnnnnnnnnnnnnnnnnnnnnnnnnnnnnnnnnnnnnnnnnnnnnnnnnnnnnnnnnnnnnnnnnnnnnnnnnnnnnnnnnnnnnnnnnnnnnnnnnnnnnnnnnnnnnnnnnnnnnnnnnnnnnnnnnnnnnnnnnnnnnnnnnnnnnnnnnnnnnnnnnnnnnnnnnnnnnnnnnnnnnnnnnnnnnnnnnnnnnnnnnnnnnnnnnnnnnnnnnnnnnnnnnnnnnnnnnnnnnnnnnnnnnnnnnnnnnnnnnnnnnnnnnnnnnnnnnnnnnnnnnnnnnnnnnnnnnnnnnnnnnnnnnnnnnnnnnnnnnnnnnnnnnnnnnnnnnnnnnnnnnnnnnnnnnnnnnnnnnnnnnnnnnnnnnnnnnnnnnnnnnnnnnnnnnnnnnnnnnnnnnnnnnnnnnnnnnnnnnnnnnnnnnnnnnnnnnnnnnnnnnnnnnnnnnnnnnnnnnnnnnnnnnnnnnnnnnnnnnnnnnnnnnnnnnnnnnnnnnnnnnnnnnnnnnnnnnnnnnnnnnnnnnnnnnnnnnnnnnnnnnnnnnnnnnnnnnnnnnnnnnnnnnnnnnnnnnnnnnnnnnnnnnnnnnnnnnnnnnnnnnnnnnnnnnnnnnnnnnnnnnnnnnnnnnnnnnnnnnnnnnnnnnnnnnnnnnnnnnnnnnnnnnnnnnnnnnnnnnnnnnnnnnnnnnnnnnnnnnnnnnnnnnnnnnnnnnnnnnnnnnnnnnnnnnnnnnnnnnnnnnnnnnnnnnnnnnnnnnnnnnnnnnnnnnnnnnnnnnnnnnnnnnnnnnnnnnnnnnnnnnnnnnnnnnnnnnnnnnnnnnnnnnnnnnnnnnnnnnnnnnnnnnnnnnnnnnnnnnnnnnnnnnnnnnnnnnnnnnnnnnnnnnnnnnnnnnnnnnnnnnnnnnnnnnnnnnnnnnnnnnnnnnnnnnnnnnnnnnnnnnnnnnnnnnnnnnnnnnnnnnnnnnnnnnnnnnnnnnnnnnnnnnnnnnnnnnnnnnnnnnnnnnnnnnnnnnnnnnnnnnnnnnnnnnnnnnnnnnnnnnnnnnnnnnnnnnnnnnnnnnnnnnnnnnnnnnnnnnnnnnnnnnnnnnnnnnnnnnnnnnnnnnnnnnnnnnnnnnnnnnnnnnnnnnnnnnnnnnnnnnnnnnnnnnnnnnnnnnnnnnnnnnnnnnnnnnnnnnnnnnnnnnnnnnnnnnnnnnnnnnnnnnnnnnnnnnnnnnnnnnnnnnnnnnnnnnnnnnnnnnnnnnnnnnnnnnnnnnnnnnnnnnnnnnnnnnnnnnnnnnnnnnnnnnnnnnnnnnnnnnnnnnnnnnnnnnnnnnnnnnnnnnnnnnnnnnnnnnnnnnnnnnnnnnnnnnnnnnnnnnnnnnnnnnnnnnnnnnnnnnnnnnnnnnnnnnnnnnnnnnnnnnnnnnnnnnnnnnnnnnnnnnnnnnnnnnnnnnnnnnnnnnnnnnnnnnnnnnnnnnnnnnnnnnnnnnnnnnnnnnnnnnnnnnnnnnnnnnnnnnnnnnnnnnnnnnnnnnnnnnnnnnnnnnnnnnnnnnnnnnnnnnnnnnnnnnnnnnnnnnnnnnnnnnnnnnnnnnnnnnnnnnnnnnnnnnnnnnnnnnnnnnnnnnnnnnnnnnnnnnnnnnnnnnnnnnnnnnnnnnnnnnnnnnnnnnnnnnnnnnnnnnnnnnnnnnnnnnnnnnnnnnnnnnnnnnnnnnnnnnnnnnnnnnnnnnnnnnnnnnnnnnnnnnnnnnnnnnnnnnnnnnnnnnnnnnnnnnnnnnnnnnnnnnnnnnnnnnnnnnnnnnnnnnnnnnnnnnnnnnnnnnnnnnnnnnnnnnnnnnnnnnnnnnnnnnnnnnnnnnnnnnnnnnnnnnnnnnnnnnnnnnnnnnnnnnnnnnnnnnnnnnnnnnnnnnnnnnnnnnnnnnnnnnnnnnnnnnnnnnnnnnnnnnnnnnnnnnnnnnnnnnnnnnnnnnnnnnnnnnnnnnnnnnnnnnnnnnnnnnnnnnnnnnnnnnnnnnnnnnnnnnnnnnnnnnnnnnnnnnnnnnnnnnnnnnnnnnnnnnnnnnnnnnnnnnnnnnnnnnnnnnnnnnnnnnnnnnnnnnnnnnnnnnnnnnnnnnnnnnnnnnnnnnnnnnnnnnnnnnnnnnnnnnnnnnnnnnnnnnnnnnnnnnnnnnnnnnnnnnnnnnnnnnnnnnnnnnnnnnnnnnnnnnnnnnnnnnnnnnnnnnnnnnnnnnnnnnnnnnnnnnnnnnnnnnnnnnnnnnnnnnnnnnnnnnnnnnnnnnnnnnnnnnnnnnnnnnnnnnnnnnnnnnnnnnnnnnnnnnnnnnnnnnnnnnnnnnnnnnnnnnnnnnnnnnnnnnnnnnnnnnnnnnnnnnnnnnnnnnnnnnnnnnnnnnnnnnnnnnnnnnnnnnnnnnnnnnnnnnnnnnnnnnnnnnnnnnnnnnnnnnnnnnnnnnnnnnnnnnnnnnnnnnnnnnnnnnnnnnnnnnnnnnnnnnnnnnnnnnnnnnnnnnnnnnnnnnnnnnnnnnnnnnnnnnnnnnnnnnnnnnnnnnnnnnnnnnnnnnnnnnnnnnnnnnnnnnnnnnnnnnnnnnnnnnnnnnnnnnnnnnnnnnnnnnnnnnnnnnnnnnnnnnnnnnnnnnnnnnnnnnnnnnnnnnnnnnnnnnnnnnnnnnnnnnnnnnnnnnnnnnnnnnnnnnnnnnnnnnnnnnnnnnnnnnnnnnnnnnnnnnnnnnnnnnnnnnnnnnnnnnnnnnnnnnnnnnnnnnnnnnnnnnnnnnnnnnnnnnnnnnnnnnnnnnnnnnnnnnnnnnnnnnnnnnnnnnnnnnnnnnnnnnnnnnnnnnnnnnnnnnnnnnnnnnnnnnnnnnnnnnnnnnnnnnnnnnnnnnnnnnnnnnnnnnnnnnnnnnnnnnnnnnnnnnnnnnnnnnnnnnnnnnnnnnnnnnnnnnnnnnnnnnnnnnnnnnnnnnnnnnnnnnnnnnnnnnnnnnnnnnnnnnnnnnnnnnnnnnnnnnnnnnnnnnnnnnnnnnnnnnnnnnnnnnnnnnnnnnnnnnnnnnnnnnnnnnnnnnnnnnnnnnnnnnnnnnnnnnnnnnnnnnnnnnnnnnnnnnnnnnnnnnnnnnnnnnnnnnnnnnnnnnnnnnnnnnnnnnnnnnnnnnnnnnnnnnnnnnnnnnnnnnnnnnnnnnnnnnnnnnnnnnnnnnnnnnnnnnnnnnnnnnnnnnnnnnnnnnnnnnnnnnnnnnnnnnnnnnnnnnnnnnnnnnnnnnnnnnnnnnnnnnnnnnnnnnnnnnnnnnnnnnnnnnnnnnnnnnnnnnnnnnnnnnnnnnnnnnnnnnnnnnnnnnnnnnnnnnnnnnnnnnnnnnnnnnnnnnnnnnnnnnnnnnnnnnnnnnnnnnnnnnnnnnnnnnnnnnnnnnnnnnnnnnnnnnnnnnnnnnnnnnnnnnnnnnnnnnnnnnnnnnnnnnnnnnnnnnnnnnnnnnnnnnnnnnnnnnnnnnnnnnnnnnnnnnnnnnnnnnnnnnnnnnnnnnnnnnnnnnnnnnnnnnnnnnnnnnnnnnnnnnnnnnnnnnnnnnnnnnnnnnnnnnnnnnnnnnnnnnnnnnnnnnnnnnnnnnnnnnnnnnnnnnnnnnnnnnnnnnnnnnnnnnnnnnnnnnnnnnnnnnnnnnnnnnnnnnnnnnnnnnnnnnnnnnnnnnnnnnnnnnnnnnnnnnnnnnnnnnnnnnnnnnnnnnnnnnnnnnnnnnnnnnnnnnnnnnnnnnnnnnnnnnnnnnnnnnnnnnnnnnnnnnnnnnnnnnnnnnnnnnnnnnnnnnnnnnnnnnnnnnnnnnnnnnnnnnnnnnnnnnnnnnnnnnnnnnnnnnnnnnnnnnnnnnnnnnnnnnnnnnnnnnnnnnnnnnnnnnnnnnnnnnnnnnnnnnnnnnnnnnnnnnnnnnnnnnnnnnnnnnnnnnnnnnnnnnnnnnnnnnnnnnnnnnnnnnnnnnnnnnnnnnnnnnnnnnnnnnnnnnnnnnnnnnnnnnnnnnnnnnnnnnnnnnnnnnnnnnnnnnnnnnnnnnnnnnnnnnnnnnnnnnnnnnnnnnnnnnnnnnnnnnnnnnnnnnnnnnnnnnnnnnnnnnnnnnnnnnnnnnnnnnnnnnnnnnnnnnnnnnnnnnnnnnnnnnnnnnnnnnnnnnnnnnnnnnnnnnnnnnnnnnnnnnnnnnnnnnnnnnnnnnnnnnnnnnnnnnnnnnnnnnnnnnnnnnnnnnnnnnnnnnnnnnnnnnnnnnnnnnnnnnnnnnnnnnnnnnnnnnnnnnnnnnnnnnnnnnnnnnnnnnnnnnnnnnnnnnnnnnnnnnnnnnnnnnnnaatgaaaaaaaaaactttactaaagcttaaaacacacattgaaccccacacaataatagtgggagacttcaatatgctactctcacctggtcattgaaagagaaactaaacagagacacagtgaaagtaagagagtttaagaaccaaatggatttaacagatatcttcagaacatttcaccctaaaacaaaagaattcaccttcttttcagtacttcagtgtaccttctcggaaatcgaccatataattggtcataaaacaatcctcaactgacacaagaagattgaaataataccatgcatcctatcagatcaccatgacctatggcttgtcttcaataacagcaaagtttacagaaagcccacatagacatggaaagtgaacaactcttcactcaatgataacttggtcagggaagaaataaagaaagagattaaaaactttctgggatttaatgaaaatgtggacacatcatacccaaacataaattcatagcactaagagccctgataagatcttacacttacaacttaaccaacacacctgagagttcttgaacaaaaagaagcaaacttacccaagaggattagaaggcaggatatagtcaaactcagggcagaaatcaaccaaatagaaacaaagaaaacaatacgcagaatcaagaaaaccaaaagctggttctttgaatcaacaaaatagataaaaccctagccaaactaattaaagggttgagagccagtatccaaattaacaaaatgaaagtgagacaaaacaacagaaacagaagaaattcagaaaaaaccatatcatactaacctcaacaaaatggaaaatctagataaaatggatagttttctagacagatacaacataccaaagttaaatcaagagcaggtatactatctaaacaggcccatatagcacaaggaaatagaagaatttatttaaaatctgacaatcaaaacaaggccagggccagatggatttagtgcagaattctaccagaccttcaaagaagacctgataccaattttcctcaaactatttcataaaatagaaagtggacgaacactacctaactcattctatgaagccacaattactctgatacctaaaccactcaaggacaacccccccctcccccaagaaaaagaacttcagatcaatctcgcttatgaatatcaatgcaaaaatactcaataaaattcttgcaaactgaatccaagaacatcaaaaccatcattcatcatgatcaagtaggattcatcccagggatgcaaagttggtttaatataagaaaatccattaatgtaatccactacataattaaactcaaagaaaaaaatcacatgatcatcttcttagatgcagaaaaagcatttgacaaaatacaacactcctcatgttaaaagtattggagagatcaggaattcaaggcccatacctaaacacaatgaaagcaatttactgcaacagccaatatcaaattaaatggaaacatacttgaagcaatcccactgaaattggggacaagacaaggatgcacactccctccatacctactcaatatagtactcaaaatgctagctagaacaacaagaaaacaaaaagagatcaagggaatacaagttggcaaagaagaaataaaagtattaccatttgcagataatgtgatagtatatgtaagtgaccccaaaaattctaccagagaacttctccagctgataaacaacttcagcaaagtggccagatataaaattgactcaaataaatcagtattcttcctttatacaaatgataaacaggctgaaaaagaaattagggaaacaactcccttcaccatagccacacaaaataaaaaatatattggggtaactctaattaaacaagtgaaaaacctgtatggcaataacttcaagtcactcaaggaaaaattcaaagaagatctcagaaaatggagagatctcccatgctcatggattggcagaattaacatagtaaaaatggccaccctaccaaaggcaatctatacattcaatgcaacccccatcaaaatcctcgggtgacaacatatgttagcgaggatatggagaaagaggaacactcctccattgctggtgggattgcaaactggtaaaaccactctggaaatctatctggaggttccttagaaaattgcaaataggtctatctgaagacccagcgataatactcttgggaatatacccaaaagatgctctaccatgccacaggggcatgtgtgccattgtgttcatagtgtccttatatgtgacagccaggaactgaaaacaacccagatgtcctacaacaaaataatggatacagacaaagtggttaatgaggacatcctgagttttgcaggcaaatggatggaattagaaaatatcatcctaagtgagataactcagacccaaaggacatgcatggtgtgtactcactaatgagtggatactagccaacaataaataaataaatacccatacagaataaccaagatacagtccacagaactcaagaaggtcaacaagctgaagtgcccaagtgaggacatgttagtcccacttgggaggtaaaagaaagcaatcacaagtggggagggagggagggacctgggagggaaagtagatgaggtgtggagagtggaggggagaggggaacatgatctgctattgggtgagggaaagttactgaagccccagcagaaagaatggaaacaggaaaccttgggatgttggctaccctccagaatgcaccagagaccttggaggtgagagactcaggaatcaaagggagggaccttagatgaagtgcctgacagtagggagagggaacttatagagcccacctccagcaggaagacaaggcatcaagtgagagggggtctgccatcccacagtcaaaactctgacccacttatgttcctgtctgaaagacctgcagggatgtaaatggagaggagcctgagaaaatgaagcaacaggcccaaagtgggattcagctcaagggaaggtcccaacacctgacactattaggctatggagcactcacaaaaagggacctataataaccgcagtcctaaagacccaacaagcagctgtaagagtcagatgcagatatttgcacccaaccaatggacagaagtagctgacccctattgttgaaatagggaaaggatgacagaagctgaggagaagggcgatcctgtaggaggaccagcagtctcaattaatctgaacccctgagagctctcaaacactggaccactaaacaggcagcatacaccagctgatatgagttccccaacacacagcagaagattggagggtctgtgttcattcagagatgatgcacctaaccctcaagagactggaggccccagattaggtgggtaggggtttggtacatccacatggaaacaggtatgggatgtggaacagtcagagggtggatggggaggtggggcaatataatatggagtgtaaaaaaataaattagttaatttaaaaaagaaaagaaacaaagaaacaaacaactaaaacaaaaacccaggatagcaaaaccaaaaccaaacaaacaaacaaacaaacaaatcaaaaaaaaaaaaaaaaaaaaagaaagccgttggttaccaccaagatataattgccaccagtgcacatccaagaatatcttgccatgatcatcactgtggttcataaatatcacagctgggtaggagtgttgattactttcttccatgagcagcttgcttatcacattctactaatatgaaaattagttctcaggaaaggcttttgggtcagttatagcttaaatcctttaaagtcctagtctagagtgcatggcatcttcagcaaaaggtttgactttcaatttctgggaggtaaccaagatcaataatagtggtctatattgtttagactctgaccaaaaacttgaaaggaattttcttatgcttggttctgaggtttgttttttaggtattttatggcactcgagggcatcaaaaccaccccagtggtagaacttcaaaatatacatatatgtaatatatacacacatataatatattacaaattatgtatataaactatatataaatatgtatgtgatatgttatatatatgtgctatatatgtatacacacatataattttgttaaatagaaaaatgttctctatgtctcttaaagcatttttcatgctagtttccacttgtcattctgtattttactccctctcacttcccgactttgaccccattttcccaatttctcctttcataacacctgtatccagctgtccaactctagagccatccctatggtctcattgtacgtttctggtttctgtggttcctataggttatatactctgagctgaagatttggaggtaggagccacagataagaaagaatatgtggcatttgtcttttagttctgggttgcctcactcaatataatattttcttagttctatccctgatacattttatgctttcctttttttctttttacagctgaatagaattccattgtgtatatgttctatgtttttgttatccatttgtagattaaagaatatttaggttgtctccattttctagctattatgaacagagctacaagcaacatggctgagtgaatatttgtggagcagggagtcaagtcctttgattataggtcaaggagttgtatagtttgatcatgcagtaaatttaattttagttttttgagaattccccatactgatttccagagtgactgtttttatttacattaatttcagtggtgaattgtggttcccttcttcatatcttcttctgtttcgttgttttgctcttaaacattctgaccgagttaacatgaaatctcaaagttgttttcatttgctttcccttagttgctaaggatgaacatgttttgagatacttgttagtcattataatatccttttttttttaaaaaagaaatctctatttagttcatagtccattgttaattggttcatgtgtttttgaatactttatatattctggatattaatcccctttccagtgtatagctggcaaatattttctttcattatgtgagcttcctctctacttgttttctctactgtacagaagatttttaattttatgttgtcccacttgtcatttgttggccttaaagtctaggtaaagagattcctattcagaaagtcctttcacacaacttttgtagaataccacccattctgtcttctaggaatttcagcattttagatctttgatccacttgaaattcatttttgtgcagagtgatagatatggtcctgatttcattcttctacccatgtatgaccagtttccccagcactatttctagaagatgctgtattttctttagtatgtgtgttgggcatcctgaaatgtcatttggctgtaggttcatgtatttctttttgggtcttctatttagttctgtttatcaatgtattttagttactgtagctctgtagtatctcttgaagtttacactggtaatccctacatcaattttatccccatggatagctgtgactatctggggtcttttatggttttacatgagtcttagaatgctttttctctttctgttaagaatattataagcgccgggcatggtggcgcacatctttgatcccagcacttgggaggcagaggcaggcagatttctgagttcgaggccagcctggtttacaaagtgagttccaaggcagccagggctatacagagaaaccctgtcttgaaaaaccaaaataataatgaaaaagaatattataagcattttgtttaggatctcacttaacctgtcaattatttttggtagaatgataactgtttttacaatatcaattctacctactcatgaacataaggagtttttacattttccaatttcttcaatttctttttctcagaaatttgaagtgttcattgtaggtatcttttatgtccttggttaattttactctagatgtcttattttctttgagattcttgtaaaagaaagtgtacatataatctccttctcagcctattaatttttagtatttaggaagtctactaatttttgtatttgacttggtatcctgacattttgctgaaatttcttattgtttcttaaaattttctggtaggatttcatgatctttcatgtacaatataatataagcaaatagggatactttgagttattttctttctattgtcattgctctaatttacttctcttccctttgtgctccagctattgcttcaagaagcattttaaagaggagtcgggatagtggacagtcttgtctcattcctaatttgaatgcagttactttactttctttttctgcttaggatgattttggttatgagtgtgtcatacagaacctttattcggtaaaagtgtagacctttttattatgaattatgatatattctgtccaagacttatcttcttctattgagataatcatgtaattttgtctttacaacaattttatggttaattacatttattaacttacatatgttgagccatcatagcatctccaggatagaggtaactttactgtggtgaatattctttttggtacctattgttatttggtttacatgtattttactgccaattttaaacatatattcatcatgattgttggattgtagttgtgtgtgtgcgttactttttggtattagaattataatggatttaaagaagagtgtgaaagtactcgtctttctattcttgaaaaataatttaagaagtattggttgtcgatattattgaaagtttgtcataattctgctgcgaatccatctgtgcctgagcttctttcagttagagtggtttttattcctgtttcaaccttccattttgttatgggtttgtttagattgtttatgtcttcctggtttaactttagtggttttgatgaatctaaaaattcaatcatttcttttagatatttcaatttaatggagtacagatttttaaaagtattttcctatgatatcctgcatttctttggggactgttgtaacctacatttctgattctttattttggatggttgggccagagtctgtcaatcttgtttatcttctcaaaacaaaacaaaacatctcctcccaaagaaaatggaacacctccctgaaacagctcttacttttctttttcatttttttttttaaaaattatttatttattttttatatactttttattaggtattttcctcaattacatttccaatgctatcccaaaagtcccccatgcccttctacccactcccatacccaccccctcccactttttggccctggcgttcccctgtactggggcatataaagtttgcaagtccagtgggcctctctttccagtgatggccgactaggccatcttttgatacatatgcagctagaatcaagagctccggggtactggttagttcataatgttgttctacctatagggttgcagatccctttagctccttgggtactttctctagctcctccattgggggccctgtgatccatccaatagctgactgtgagcatccacttctgtaggacccagcataatctcacaagacacagctatatctgggtcctttcagcaaaatcttgctagtatatgcaatggtgtcagcgtttggaagctgattatgggatggaaccctggatatggcaggctctagatggtccatccttttgtcacagctccaagctttgtctctgtaactccttccatgggtgttttgttcccaattctaagaaggggcaaagtgtccacactttggtcttcattcttcttgagtttcatgtgtttagcaaagtgtatcttatatcttgggtatcctaagtttctgggctaatatccacttatcagtgagtacatattgtgtgagttcctttgttattgggttacctcactcaggatgatgccctccaggtccatccatttgcctaggaatttcataaattcattctttttaatagctgagtagtactccattgtgtaaatgtaccacattttctgtatccattcctctgttgaggggcatctgggttctttccagcttctggctattataaataaggctgctattataaatacggctgctatggacatagtggagcatgtgtccttcttaccagttggaacatcttctggatatatgcccaggagatgtactgcaggatcctccggtagtactatatccagttttctgaggaaccgccagactgatttccagagtggttgtacaagcttgcaatcccaccaacaatggaggagtgttcctctttctccacattctcgccagcatctgctgtcacctgaatttttgatcttagccattctgactggtgtgaggtggaatctcagggttgttttggtttgcatttctctgatgattaaggatgctgaacattttttcaggtgcttctcagccattctgtattcctcaggtgagaattcttttattagctctgagccccattttctaatggggttatttgattttctggagtccagcttcttgagttctttatatatattggatattagtcccctatctgatttaggataggtaaagatccttccccaatctgttggtggcctttttgttttattgatggtgtcttttgccttgcagaagctttgcagtttcatgaggtcccatttgttgattctcgaccttacagcacaagccattactgttctattcaggaatttttcccttgtaccaatatcttcgagggtttgccctactttctcctcaataactttcagtgtctctggttttatgtggaattccttaatccacatagttttgaccttagtacaagaggacaggaatggatcaattcgcattcttctacatgaataccgccagttgtgccagcaccatttgttgaagatgctgtcttttttccactggatggtttttgctcccttgtcaaagatcaagtgaccatatgtgtgtgggttcatatctgggtcttcaattctattccattggtctacttgtctgtcactgtaccagtaccatgcagtttttatcacaattgctctgtagtaaagctttaggtcaggcatggtgattccaccagaggttcttttatccttgagaagacttttttctatcctaggttttttgttattccagatgaatttgccgattgccctttctaattcgttgaagaattgaattggaattttgatggggattgcattgaatctgtagattgcttttggcaagatagccatttttactatgttgatcctgccaatccatgagtatgggagatctttccatcttctgagatcttctttaatttctttcttcagagacttgaagttcttatcatacatatctttcacttccttagttagagtcacgccaagatattttttattatttgtgactattgagaagggtgttgtttccctaatttctttctcagcctgtttattctttgtgtagagaaaagccattgactcgtttgagttaattttatatccagctacttcaccgaagctgtttatcaggtgtaggagttctctggtggaatttttagggtcacttatatatactaacatatcatctgcaaaaagtgatattttgacttcatcttttccaatctgtatccccttgatctccttttgttgtcgaattgctctggttaggacttcaagtactatgttgaataggtagnnnnnnnnnnnnnnnnnnnncatgtggtttttgtctttgagtttgtttatattctggattatgttgatttatttccgtatattgaaccatccctacatccctggggatgaagcctaacttggtcaggatggatgattgttttgatgtgttcttggattcggttagcgagcactttgaggatttttgcattgatattcataagggaaattggtctgaaattctttatcttagttgggtctttttgtggtcaaggtatcagagtaattgtggcttcatagaatgagttgggtagagtaccttctacttctattttgtggaatagtttgtgcagaactgggattagatcttctctgaaggtctgatagaactctgaactaaacccatctggttctgggcttattttggttgggagactattaatgactgcttctatttctttaggggatataggactgtttagatcattaacctgatctttatttaactttggtacctggtatctgtctagaaacttgtccatttcgtccaggttttccagttttgttgagtatagccttttgtagaaggatctgatggtgttttggatttcttcaggatttgttcttatgtctgccttttcatttctgattttgttaattagaatgcttttcctgtgccctctagtgagtctggctaagggtttgtctatcttgttgattttctcaaagaatcagctcctcatttggttgattctttgaatagttcttcttgtttccacttggttgatttcgcccctgagtttgattatttcctgccttctactcctcttgggtgaatttgctttcttttgttctagagtttttaggtgtgttgtcaagctgctagtgtgtgctctctctagtttatttttggaggcactcagggctatgagttttcctcttagaaatgccttcattgtgtcccataagtttgggtatgttgtagcttcattttcattaaactccaaaaagtccttaatttctttctttattccttccttgaccaaggtatcattgagaagagtgttgttctgtttccacgtgaatgttggctttctattatttattttgttgttgaagatcagtcttagtccatggtgatctgataggatgcatgggacgatttcaatatttttgtatttgttgaggtttgttttgtgtccaattatgtggtctatttaggagaaggtaccatgaggtgctgagaaggtatatccttttgttttaggataaaatgttctgtagatatctgttagatccatttgtttcataacttctgttagtttcactgtgtccctgtttagtttatgtttccatgatctgtccattggtcaaagtggtatgttgaagtcccccactattattgtgtgaggtgcaatgtatgctttaagctttagtaaaatttctttaatgaatgtggctgcacttgtatttggagcatagatattcagaattgagagtttnnnnnnnnnnnnnnnnnnnntgttttcctgtaattctttaaggcatttttgtgcttcctctttaagatcttctatcagtttagcagtgttctcctgtatttttttgagtgagttattaaggtccttcttgatgtcgtctaccatcatcatgagatatgcttttagatccaggtctagcttttcgggtgtgttggggtgccctggactgggcgaggtgggagtgctgggttctggtgatggtgagtggtcttggtttctgttagtaagattcttatgtttacctttcaccatctggtaatctctggagttagttgatttagttgtctctggttagagcttgttccttaggtgattctgttactctctatcagcagatctgggagactagctctctcctctgagtttcagtggtcagagcactctctgcaggcaagctctcctcttacagggaaggtgcacagatatctggcgttaggacctccatcctggccaaagacgaaggcccaaaacaggacctgtcctgcggctgagttgctttggcctgtcccagaagctgttagcttctgtattctacactctcacctgtgcagaatactctcggaggagtcctggaaccaagatgtctgcagcgaatgctcaggccaagcgctctcggcccgggcagacccctatcctctgaccaggaaagtggccagatgtctgggttctgaaaaagggctgccttagaagctctgtggctcctgcctgtcctagaagctgttagcttctgtatcccgcactctgacctgtgccgaatactcttggcggggtcccggaaccaagatgtctgctgctgatgctcaggcaaagcgcctctgggccaggaggacccctatcctctggccggaaaagtggcccttacttttcttgattccttctgttgtgttgttttatttgttttgatctcattcatttgtgctctcgagttttattatttcttgccatctactgtatttgggtttggtttttttgtgtttgtccaaagtcttgagttgcatcattaaattgtttacttattcacttcctgattcccgccccccccttttttttaaaaaacgaattcttctgattttattaaatgatgtattttggagaagtctgaatctgtctcctgctatggtactaattgggagagatggttcttctataccaaggtgaggaaacacacttattccaacagggccacaccttctaattatgtcactccctgggccaagcatatagaagccatcacattccactccccagcctctataggcttgttcaaacatattagtctatgggggtcatacctaaacataacatgcaaaatacatttagtccaactttaaaagtccccatagtctatagcagtctcagcaatgttaaaagtccaaagttcaaagtctcttctgacattcattcaatcacttaannnnnnnnnnnnnnnnnnnntttcttgccatctactgtatttgggtttggtttttttgtgtttgtccaaagtcttgagttgcatcattaaattgtttacttattcacttcctgattcccgcccccccccttttttttaaaaaacgaattcttctgattttattaaatgatgtattttggagaagtctgaatctgtctcctgctatggtactaattgggagagatggttcttctataccaaggtgaggaaacacacttattccaacagggccacaccttctaattatgtcactccctgggccaagcatatagaagccatcacattccactccccagcctctataggcttgttcaaacatattagtctatgggggtcatacctaaacataacatgcaaaatacatttagtccaactttaaaagtccccatagtctatagcagtctcagcaatgttaaaagtccaaagttcaaagtctcttctgacattcattcaatcacttaactgtaattccatagcaagacaggacaccagggaaatctccaaactctgcatctctatggctgatgtcaaacaatcttcagatctccagctcctttattgtctttgttgactgcaacaaacttctttctcttgagttggttccactccccattagcagctttcttcagcagataggtcatggctctggcatcttgaacatcttggggtctccaaggcaactccattgttattgcttcttttctgagaatcacacatgatcttctggactcctccaaagggctggggtcacttctccagctttgctgtctgtagcactgtaagctcaggttgatccactctactgttcttagtgatcctcccatgtactggcctcttcaatacactgtggtcttctgttttaactaggcttcatagcctatcataggctctctttatggttccaagcctcaactcctttgtatgaccccttcagtcctgggctgtctactgcatctgaggctgcaccttcaccagtggccttccatgggctctcacagtgccaagccttggctgctcttcatgaccccttcatgccttcaaaaccaataccacctgggtgactcttacacattacccagtacagctgcagcacaaggtacagccttggctagttttgtaacatagcttctttgtgctcttagatttcacctcagtgatttagtacttgaagttctagctagagcacttagacaacacaaagtcatcaacgggatacaaattggaaaggaagaagtcaaaatatcactatttgcagatgatatgatagtatacttatgaccacaaaaactccaccagagaactcctacagctgataaacaacttcaacaaagtagctggatataacattaatgcaagcattctcacccaaagaagggaataatagagccagggaatcccactgagatagagatcttctctacagctaggtatagcaagcttcacattagaagcaagttggtatattctgtagacccaggaaatagggtgttgaggtattgcagtattcatgataaggcctgctagtgcagaacccctggtggtaggtttaacaatagactagtttacacttgactctcttcttttgtggcagctgcctggtccccaccttcttttgatgtatacattccttttgtattgagtcactgtaacttggtggattgtattttgcctggtttcttgttatttctttggtataaaaagtttgatgctcgacctgacacaatacattcagattctacacacacacacacacacacacacacacacaattaatgcaaacaaatcagtagccttcctctactcaaaggataaacaggctgagaaagaaatgaggggaaacaacaccattcactgtagtcacaaaaattatgaagtaccttggtgtgactttaaccaagcaggctggtcagagcttcagagattatagagcccttgaaatgttgcaattcctgtgcctaattacagataatcttgtgttgttttggccccttactagccatttattactaacttctgtgtgttttttaacatttttgcgactactaggtaggtctttggaatgaacagacccctaacttctctaaggcaaaggctaaaaatgctgtcagatagcatgtgaggcccatgactgactgaggctctcctgcttttctctcaggctccatctgttgtcttagggcttttactcagcatgatcattcattttcatccatctcctcgctccattaggtgccttcatactaatttatcttcacatctagtcataagatcaaagnnnnnnnnnnnnnnnnnnnntctgattttattaaatgatgtattttggagaagtctgaatctgtctcctgctatggtactaattgggagagatggttcttctataccaaggtgaggaaacacacttattccaacagggccacaccttgctaatcatgtcactccctgggccaagcatatagaagccatcacattccactccccagcctctataggcttgttcaaacatattagtctatgggggtcatacctaaacataacatgcaaaatacatttagtccaactttaaaagtccccatagtctatagcagtctcagcaatgttaaaagtccaaagttcaaagtctcttctgacattcattcaatcacttaactgtaattccatagcaagacaggacaccaggggaaatctcccaaactctgccatctctatggctgatgtcaaacaatcttcagatctcccagctcctttattgtctttgttgactgcaaccaaacttctttctcttgagttggttccactccccattagcagctttcttcagcagataggtcatggctctgtgactttaaccaagcaggctggtcagagcttcagagattatagagcccttgaaatgttgcaattcctgtgcctaattacagataatcttgtgttgttttggccccttactagccatttattactaacttctgtgtgttttttaacatttttgcgactactaggtaggtctttggaatgaacagacccctaacttctctaaggcaaaggctaaaaatgctgtcagatagcatgtgaggcccatgactgactgaggctctcctgcttttctctcaggctccatctgttgtcttagggcttttactcagcatgatcattcattttcatccatctcctcgctccattaggtgccttcatactaatttatcttcacatctagtcataagatcaaaggaagctgatcatatagcatttaattaattagttagttgattaatttctacattctgcacagtttttcaggcagcagtatccagcatttgttcaataaactattgattactggttaaattattaaaaatctcaacactgaaattcagtattatgtacacgagaataaaaaaagggtttatactaaatagtatttatcttaaaacagtctctaatttaaaaagaggaataagaagacacaaatgttatagcatggggaaaacagaggagttggtgttgttgactggctgtgtgatctcagacaagttattttgcttccccattcttttacttacccatctataataatgccaaattatttaattggacattcttttttttctttttctctctctctttctttctttcttttcttttcttttcttttctttctttttttttttttttttttttttgatacagggtttctctgtatagccctggctgtcctggaactcactttgtagaccaggctggcctcaaactcagaaatccacctgcctctgcctcccaagtgttgggattaaaggtgtgcgccaccaccgcctggctaattggatattcttaaagctttgggttttgtcatagtcagggtttctattcctgaacaaacatcaggaccaagaagcaagttgggggaggaaagggcttattcagcttacacatcccatgttgctgttcatcaccaaaggaagtcagaactggaactcaagcaggtcagaaagcaggagctgatgcagaggccatggagtgatgttacttactggcttgcttcccttggtttgttcagcttgctctcttatagagccaaactaccagcccaggatgcaaccacccacaatggacccttcccccttgatcactaagtgagaaaatgccttacagctggatctcatggaggcatttcctcaagggaaggctcctttctctgtgataacaccagaaatgtgtcaagttgacacacaaaaccagccagtacagttttcaaatatcatgtgcagctaaaagtacactaaccaaatgatttttttaccatgttctgaatccacatgaatgtgatttagaaggttaggggtgggtcccaagaaattcctctgtccctttacaatgtaactgtggtacacagctatgtttgagaacaactaatctagtagcttttagttttagcatcttattgccttgtaattttagaataaggccaccttagaaagtatagcagatagtaattgtattaaggtactttattcatttaaagttaggaaacattttattgcttgtgtgaagaacaaggggctagctggataagatgatgttaaaattggccattaagactcagtagagatataggtaagttcaggtttgcttggattttaatataacttaatgcttgcaatatatatatggcagcaggagcagtgacctgtttgatacaatggaccctagtcctagttttctttttgctctcaaagttgttttccttttgtcgatgaaatattttatggcttcagtttgctttctgaaagtgcagcatgtgagtcaggttgggcatcagaaggtttctccatgaaataaaagaacacaactttcctcaagcctctagggggctgtgcccttgtgattcacttaagctagtcccgattggacttctgggttagatacaaagactatcaggaccactatgttatttaaaataatagatttactgcagaattattattattaaagccaaagttggctttttttgtttagatgaaaccatataaaggcaacatttctgagtaaattacatagcgtccatttgatgaaataatgagctctaagtttaggggatgaaagtaatgatctaatgcaatatttagcatgagtgtttagtatgtagtcattaacgtaaaagtcacatcctgcattcttttaatttgtgaaaaatgtgtcattaattgcccaagagaacctctgatttttcatacaaaatcacctcatagctgttgactttctcccccttctcctgccttaaaatacagccctataagcagtagcattactctcagaatttgtatgccccctctaaatattgaactgctaagtttagccccattgctatttttcaaaaatagacttctttccccatccagctttgtctttgagaagctaccagcaaatcacagttttattttaatgacaactggtttaaaatcttacttaacctttctacccattaagaacctgctaattttgaaacgtaattactgcatttgtggaggaaatggatattatatttcatttaggaagcactttgaaagataagttctggtctttaattcaaatccattctaaatgaggcagggtcaggcaaaaagaagtcaaaaattgaaagaaccagcaggttgatctcttgtgatccaggccaacctggtcttcatactgagttccaagacatccaggcctctccctctacctctccctctttcttaccctctccctgcctcctccctctgacacacacactcatacacatgaaatggaaaaaaataaggtatataagaaataaggtagccaggttgatatgcagcccttgagtctagccattgcctaccttgttttaggatttgcagatttggcttgtaacccattccacccaatctactgctttcatgtgtctttgataatgacaatgtaacaaacatttgttgacttttgaagtgaaaaaaaacttatagtgattaatttcctgttagtagttacctttatgaatttaaattcttggactctagtatttttagagtgtcttagagggtgactttcattggtgtttctttgaaagagaaaataaaaagacctcaaaagagatatatgaaagaagaatctgtcttaccaacttcagacttcagaaaatgtccccaaatccaggaagaggaatcatgagaaaaatgtctactattgcatctcttctgtattattatttgacagctaaaaggaatagtattgttagaaatgcagatgttaattgtaagatttgagataatttactattttgcaagtgtgtgttctgtgtttagactgtctgtagttatgacatttgttttatctaaaggacttggggtattatctttctatatattaggatttcaaatgtttatttatttgactttgaaatacttaaaaccccacaagcttagctaaaatgatcataacttcatagagaaagtatttgagggtcaaaggagttaaatgagatgcgatcagtacatgtacctacttgggtgttggcaaaacttagaaaccgtgcttctggccttcccttccagggtatttttactacaaaaatgttcttttgattttgcattttgaaagacacagaaagtgatctgtgaaatggttattagcactaggcagcccaagcagccctggagtgcttcatggttcaaatgcccaagaccagatggaagtccagaagtggatgactcagaatttattagttctgccacctgggtagtacagccggaaccagctgccacaaggccagttccaatttcagcaaagcagtaaatgaacacgaaaaatgagagtcagtctcccatataaaaggagaatggcggatacagcagcgagattctcccagcatgattcatattgataccttcttgtaggaagtatagttccccatgccacgcaccaggcaagaaatgtcttatggaacccttgccctgaaaaaaatccacatcagcgttgttccagaagctactgtcagtttggggtatgtttggattataggccgagttagttccccagtcacatctgatgatctgcaagaggaatcataatgatgtcgtcaatgctgtataaaagctatattatgaactcagaggtttttttttcttgtggattatgaaatatcatttattacattttcatagtcccgatccctagaaagctaagttttcagggatcctaagatcactatggatggtcatagaaatcctgccattatcctcatgttttacttatgtggacttgaaagttcatacaatcacacaattgtacacagcaggatgaggcaggagaattgctgcaagcttgaagctaaccctaggttatagagtttgttccaggataccctgatttatagatggagactgtattctcaagtctcaaaacaaccaacaaaccaatggaaaatcaaagtaagaagggttttcaagggtctgtcaatgaaacaaggctaaagtgaggtttcagacctatggtgctcaaacacaaaatgtacctaataatgaaggcttgggtcagattaagttgagagagatacagtacttttgcttaaatgaggaaggtttattaatgagttaaaaatctttttttatatatcaaaagatgcttgggcatttttcaaaactcaactaaactggcttaatagaaacttggcattatttctttgtttgttgaaaagcttaagagatgatatagctccttgctttggttcactggcctctgtgatgatgcatgctttttgctgtcatgatgaaaaggaaacagggcatagtcgagaagggagttcatccctagttgctgacttactgtgctgaagctttgtgtttttaccctcaaggctagaccaaggtgaccttggcttcgctaacatctgccttcagatggccttttcaggagaagaatttttgtgtgtttatatttttaaacttatcattacttagtcatgcaataatgtaatacggttctctatttgtgtgaagagaatatgtcaagtatatgttatcaatgaattgggatctttttcattatgtaatgacatgaagtgaagtggctttatattacaacattttgctcataattacaggtaaactaattcatttacttcctatttttattctggcaggtggcatgtttgacccaagtagctgctaattatcttattggacaaaaggaagcgaaacgctggggcacagctcatggcagtattgttccttatcaggtacaagttagcctcctgttactatattttccagatctgtacaaacaatgaagtttttacagatcctcccatggttgtatcataatgtatctctgacttgttacagcaaggttctatttttgtttttaattttttttgttgccatttcttcacttaagtggattgaaggcacttacagaaagagagttatagtggggctaatatcatcgtttctttctcttagtctctctctctnnnnnnnnnnnnnnnnnnnnctctccctctgctcactttctttcttctttcatccaaaagccattgactatagctagttcattatcctagctataaaacaaatgttaccttttctatctgacaacaatattctcacagggttagactgaagtgaaaatttgcgtgtgatggatcttcatccttggagaaaaaccgatggtttaagagctgctgttctctattaaatgtctaaacttatcctcagaaattctggactttggattgtgcaaatgaatatgtgaagaaactgtgatcctttaaaaataacaaaactctactgcctcttccaagccactagctttagctggcctggttgcttatttcttcacatttctgcatatatttgtcaaactttccatactgcatcatgagtttaagagtagcagggtctttctcatcttttatctcatatccagtagaaatgcaggcagtatactctggaattatcttctgaataaaggaatggatcttattccagctatttcaatatgtatattcttgataggaaacgcataaagtcaggatttttcatttgataggaaattcatcagtgtttcagtcatcatttcaatgttaagaaattatttctttgggcaggtctagtttcatttcttctactttaatccaaatttgaggaaaacataattcagtgtgagatcagcatgttttcctcttatctgtttatggctatttaaaaaaaaatgttgcgttcttcctggtcccccatccaagcattcttcaccccaccatcttcctcttgcttctgagagggtgctcccacttaaccatccatccccatgtcatcccccttcccagaggcatcaagtctcttgagtattaggcacatcctctcccactgaggccagataagacagtcctctgcaacatatgtgctggggactatggaccagcccttgtgtgcttttttgttggtggcttagtctctgggagctcccagggggtctaggttagttgacactgttggtcttcctattggattgccatccccttcagctccttcaattcttctcctaacccttccatagaggacactgacttctgtccaatggttggctgtaagtatctgcatctgtctcagtcagctactggtagaacctctcagaggacagtcatgctaggctactgtctgcaagcataatagtcagggttttgtgcctgcccataggatggatcccaagttgtgttagtcactagaagaactttcctttattccctgttccatccgtttgtccctgccatttttttttaaaagacaggaacaattctggataaaaaaactttgaaggtaggttggtgaccctatctctccactgggggctctgtcgatctacttgagatggtctcttcaggttccatcttctcattgttgggcattttggccaaggttattcctgttgagtcctggaagcctctcacatgccaggtctctgggactttctagcagtttccccgcccccatcccctacagtagctatttccattcattcttttgtcctctgggactccctcctgttcctccccaaacccccttctctttcacccaggtctctctctctcacctctctgccttttgtgattattttgttccctcttctaagtccttcttgttaaacttcttgcagtctgtttgttgtatcatgggtattctgtacttttggactaataaaaatatccacttttctgtgagtatataccatgcatgtctttttgggtctggattgcttccctcaggatgatattttatagttccatccatttgcctacaaaattcatgatgtcctcatttttagtaattgaatagtataaattgtgtaaatgaacacaggcaaacaggtagaagcccttaaagaggaaacaaataaatcccataaagaaatataggaaaatacaatcaaataggtgaaatagttgaacaaaacagtccgagcctaaaaatggaaatagaaacaacaaagaaatcacaaatggatgcaaccctggagaagacaacttaggaaagagatcaggagctacagatgcaagcatcaccaacagactacaagagatgcaaaagagaatctcaggtgttgaagatactatacacgatatcgacacatgggtcaaagaaaatacaaagtgtataaagtttctaacccaaaaacctaggaaatttgggacacaatgaaaataccaaaccagccaggtgtgccggcacacacctttaatcccagcactcgggaggcagaggcaggtggatttctgagttcgaggccaacctggtctacaaagtgagttccaggacagccagagctatacagagaaaccctgtctcgaaaaacaaaaacaaaaacaaaaacaaaaaacaaaaaaacaaaacaaaaaaaaacaaaaagaaaagaaaagaaaagaaaatactaaacctaagaataattggaatagaaaagggggaagattcccaatccaaaaggccagaaaacatcacaatcatagaagaaaacttccctaacctacatccccataaatgtacaagaagcctacagaacaccaaatagtttggaccagaaaagaaattccttttgccatataataattgaaacactaaatatatataacaaagaaagaatactaaaagctgtaagggaaaaaggccaaaaaacatataaaggcagacctatcagaattacatcagacttctcaaggagagactctaaaagccagaagatcttggataggtaccctaagagaccacaaatgctagcccaggcaactatacccagcaaaactttcaatcatcagagatggagaaaccaagatatttcacaacaaaaccaaatttaaacaatatctttctactaatctatccctacagaggaaaactccaacaccaggaggtttatacctattttatatctgaggctttgatatgattgtctgctataactgcttttctcattttgatttaccttctaggataattacaagtttggagaatttcttcatgtcactttagacatgtttgcttacctaaggtggctgcctttcttcttcttcttcttcttcttcttcttcttcttcttcttcttcttcttcttcttcttcttcttcttcttcttcttcttcttcttcttcttcttcttcctcttcctcctcctcctcctcctcctcctcttcttcttcttcttcttcttcctcttcttcttcttcttcttcttcttcttcttcttcttcttcttcttcttcttcctcttcctccctcctcctcctcctcctcttcttcttcttcttcctcttcttcttcctcttcttcttcttcttcttcttcttcttcttcttcttcttcttcttcttcttcttcttcttcttcttcttcttcttcttcttcttcttcttcttcttcttcttcttcttcttcttcccctcctctagacttctagctaaaacatcctttccttgattcatagaagaattttttgatcttaaaaagtaagatatctggtttttcatcaggagcatacaatctgcttcctctgtctagagaactggttaaacatactgattaaaggtggaatgaaaatttaactggaattaaactaatataataagattggccttagatatgcttcaagattcttgtctctccacagttttttaaatagacctgaggaatattttcatgagtgaatctaagataattattattcagttcctatgataattagttttgtttctaatttgcttcttattgtctgagtttttagtccagtgtctataataaagatcctgatagttttgggattattttttttttttttttagattcccaccttgctttatttagttgttgatctccttcagataatcatagaccttgaatacattcaatgtattcttctgggaaacagtagcccctcattatgttattttataaacatgtactttttaatttctcaaatcagtaattcattggtacacttttcttcttaattctttggctgctaacttttatattttgtgaatttttgagacatggtcttgatatatagtacatcaggccttgaactttgatattcttatgttaatcttgtgtatagtaggttttaggtatgtgccatcatgtcctagcaagtttttaaaacttaacaagttaagaaaaacgaatttattaaaattataggtaaatgggtagaactagcaataatcattgagactaatgtaacccattctcagaaagacaaacattgtatgatttttcttgtatatgaatattagttactaagctttacatatgtgtatgatggaaaaagtgtagagaatgaaagattaaatggattggaggatgggagagcaggatagaagaaggaatactggcaatactatctaacattaaatgtcttttgaaaaagccatatgtaacctaataccatagaagttttctaacacacacacacacacacacacacacacacacacacacgagtatattttgagttacattctaaatagagcaaggtcccaaatatacaatatatattccctaaaaaccatatatgggttaccttttttgagtcattggtccagggaaatcatatagatccccttcaacatgacagggtagtgccattgctattgtctaccatctacaatttagcttttagattctattgcagaagatactacatatttgagtacaagaacatagagatatctaattggtactcaactggaagcttcagtcctactggctagcattcatacttttggaagtttctacaaaagctgtcaaaatagaaaagtaaactttagtctcacccagctcagaatcctgtgagccatagtaatgacatatgccatatgatgagagagtggctcaatgttatgggagtaaccagacactttttgattggatttaactactgtctcaagagatagaacccatacatgacatcatcaatgtgaccaagagcctgtaactagataggtcatgggcaacaggggaaaacctattactagtattctacaaggacatggcaataaaacaatttgtgaaatattattgctatgttttcatggttgtacattgctcaaccctcatcaaagaaacttcttgaagtgggtggtaattaatacaaagacttaatcctagtcaatgtgcagagagtaagagattaacattggatgtttaaccctgaaagggatatctttagccctgaaaggcatgggaagattttaagagccaaaggggaaacatcaaggaaactgtttttcagacagaataaggtagatgctcacatgaattcacaatgatcatgacagcaagcacaagccctacaagcttgataaaatctaagcatggaatttatttccttttattaatttattatccttcctttcccatctctattaaagtctccacatttctccacttcccctttgataacattgctattttcctctccagaacgctttcctctcacctctagtggttcctttctactttcctggcttctatagttatttcaggttatacactgaaatttaaagatttaaatctagtatccataaatacgaacaattaggtagtgtttgttttatgagataatttattcagtataatatttcccagttctattaacttacatataaatttcatgacttaatttttctatatctgaatagaatttcattgtttatttgtaacatattttcattatctatccatcatttgatgaacatctaggcttcttttcacccctttaattttaatattgtaacccgagtttattagaaactcccttgccaatttcagtttcttaaaagcctacatttgtgtgaattctgatatccagttatctttcaaatcatcaaaaatctattcacatgtatgctcatgaggatagaaaactatcgtgagtacactgaagaagaacactgaatttattttttattgttgaagtttagccaacatcaaaaccgaagtactctcatttctttttttttttttttccattttttattaggtatttaactcatttacatttccaatgctataccaaaagtcccccatatccacccacccccactcccctgcccacccactccccctttttggccctggtattcccctgtactggggcatataaagtttgcaagtccaatgggcctctctttccagtgatggccgactaggccatcttttgatatatatgcagctagagtcaagagctccggggtactggttagctcataatgttgttccacctatagggttgcagatccctttagctccttggctactttctctagctcctccattgggagccctatgatccatccattagctgactgtgagcatccacttctgtgtttgctgggccccggcatagtctcacaagagacagctacatctgcgtcctttcaataaaatcttgctagtgtatgcaatggtgtcagcgtttggatgctgattatggggtggatccctggctatggcagtctctacatggtccatcctttcatctcagctccaaactccgtctctgtaactccttccatgggtgttttgttcccaaatctaaggaggggcatagtgtccacacttcagtcttcattctccttgagtttcatgtgtttagcaaattatatcttatatcttgggtatcctaggtttggggctaatatccacttatcagtgaatacatattgtgtgagtttctttgtgaatgtgttacctcactcaggatgatgccctccaggtccatccatttggctaggaatttcataaattcattctttttaatagctgagtagtactccattgtgtagatgtaccacattttctgtatccattcctctgttgaggggcatctaggttctttccagcttctggctattataaataaggctgctatgaacatagtggagcatgtgtccttcttacctgttggggcatcttctggatatatgcccaggagaggtattgctggatcctccggtagtactatgtccagttttctgaggaaccgccagactgatttccagagtggttgtacaagcctgcactcccaccaacaatggaggagtgttcctctttctccacatcctcgccagcatctgctgtcacctgaatttttgatcttagccattctgactggtgtgaggtggaatctcagggttgttttgatttgcatttccctgatgattaaggatgttgaacattttttcaggtgcttctctgccattcggtattcctcacgtgagaattctttgttcagttctgagccccattttttaatggggttatttgattttctgaagtccaccttcttgagttctttatatatgttggatattagtccnnnnnnnnnnnnnnnnnnnnnnnnnnnnnnnnnnnnnnnnnnnnnnnnnnnnnnnnnnnnnnnnnnnnnnnnnnnnnnnnnnnnnnnnnnnnnnnnnnnnnnnnnnnnnnnnnnnnnnnnnnnnnnnnnnnnnnnnnnnnnnnnnnnnnnnnnnnnnnnnnnnnnnnnnnnnnnnnnnnnnnnnnnnnnnnnnnnnnnnnnnnnnnnnnnnnnnnnnnnnnnnnnnnnnnnnnnnnnnnnnnnnnnnnnnnnnnnnnnnnnnnnnnnnnnnnnnnnnnnnnnnnnnnnnnnnnnnnnnnnnnnnnnnnnnnnnnnnnnnnnnnnnnnnnnnnnnnnnnnnnnnnnnnnnnnnnnnnnnnnnnnnnnnnnnnnnnnnnnnnnnnnnnnnnnnnnnnnnnnnnnnnnnnnnnnnnnnnnnnnnnnnnnnnnnnnnnnnnnnnnnnnnnnnnnnnnnnnnnnnnnnnnnnnnnnnnnnnnnnnnnnnnnnnnnnnnnnnnnnnnnnnnnnnnnnnnnnnnnnnnnnnnnnnnnnnnnnnnnnnnnnnnnnnnnnnnnnnnnnnnnnnnnnnnnnnnnnnnnnnnnnnnnnnnnnnnnnnnnnnnnnnnnnnnnnnnnnnnnnnnnnnnnnnnnnnnnnnnnnnnnnnnnnnnnnnnnnnnnnnnnnnnnnnnnnnnnnnnnnnnnnnnnnnnnnnnnnnnnnnnnnnnnnnnnnnnnnnnnnnnnnnnnnnnnnnnnnnnnnnnnnnnnnnnnnnnnnnnnnnnnnnnnnnnnnnnnnnnnnnnnnnnnnnnnnnnnnnnnnnnnnnnnnnnnnnnnnnnnnnnnnnnnnnnnnnnnnnnnnnnnnnnnnnnnnnnnnnnnnnnnnnnnnnnnnnnnnnnnnnnnnnnnnnnnnnnnnnnnnnnnnnnnnnnnnnnnnnnnnnnnnnnnnnnnnnnnnnnnnnnnnnnnnnnnnnnnnnnnnnnnnnnnnnnnnnnnnnnnnnnnnnnnnnnnnnnnnnnnnnnnnnnnnnnnnnnnnnnnnnnnnnnnnnnnnnnnnnnnnnnnnnnnnnnnnnnnnnnnnnnnnnnnnnnnnnnnnnnnnnnnnnnnnnnnnnnnnnnnnnnnnnnnnnnnnnnnnnnnnnnnnnnnnnnnnnnnnnnnnnnnnnnnnnnnnnnnnnnnnnnnnnnnnnnnnnnnnnnnnnnnnnnnnnnnnnnnnnnnnnnnnnnnnnnnnnnnnnnnnnnnnnnnnnnnnnnnnnnnnnnnnnnnnnnnnnnnnnnnnnnnnnnnnnnnnnnnnnnnnnnnnnnnnnnnnnnnnnnnnnnnnnnnnnnnnnnnnnnnnnnnnnnnnnnnnnnnnnnnnnnnnnnnnnnnnnnnnnnnnnnnnnnnnnnnnnnnnnnnnnnnnnnnnnnnnnnnnnnnnnnnnnnnnnnnnnnnnnnnnnnnnnnnnnnnnnnnnnnnnnnnnnnnnnnnnnnnnnnnnnnnnnnnnnnnnnnnnnnnnnnnnnnnnnnnnnnnnnnnnnnnnnnnnnnnnnnnnnnnnnnnnnnnnnnnnnnnnnnnnnnnnnnnnnnnnnnnnnnnnnnnnnnnnnnnnnnnnnnnnnnnnnnnnnnnnnnnnnnnnnnnnnnnnnnnnnnnnnnnnnnnnnnnnnnnnnnnnnnnnnnnnnnnnnnnnnnnnnnnnnnnnnnnnnnnnnnnnnnnnnnnnnnnnnnnnnnnnnnnnnnnnnnnnnnnnnnnnnnnnnnnnnnnnnnnnnnnnnnnnnnnnnnnnnnnnnnnnnnnnnnnnnnnnnnnnnnnnnnnnnnnnnnnnnnnnnnnnnnnnnnnnnnnnnnnnnnnnnnnnnnnnnnnnnnnnnnnnnnnnnnnnnnnnnnnnnnnnnnnnnnnnnnnnnnnnnnnnnnnnnnnnnnnnnnnnnnnnnnnnnnnnnnnnnnnnnnnnnnnnnnnnnnnnnnnnnnnnnnnnnnnnnnnnnnnnnnnnnnnnnnnnnnnnnnnnnnnnnnnnnnnnnnnnnnnnnnnnnnnnnnnnnnnnnnnnnnnnnnnnnnnnnnnnnnnnnnnnnnnnnnnnnnnnnnnnnnnnnnnnnnnnnnnnnnnnnnnnnnnnnnnnnnnnnnnnnnnnnnnnnnnnnnnnnnnnnnnnnnnnnnnnnnnnnnnnnnnnnnttttctcaaagaaccaactcctcgtttggttaattctttgaatagttcttcttgtttccacttggttgatttcacccctgagtttgattatttcctgccgtctactcctcttgggtgaatttgcttcctttttttctagggcttttagatgtgttgtcaagctgctagtatgtgctgtctcccgtttcttcttggaggcactcagcgctatgagtttccctcttagaaatgctttcattgtgtcccataggtttgggtacgttgtggcttcattttcattaaactctaaaaagtctttaatttctttctttattccttccttgaccaaggtatcattgagaagagtgttattcagtttccatgtgaatgttggctttccattatttatgttgttattgaagatcagtcttaggccatggtggtctgataggatacatgggacaatttcaatatttttgtatctattgaggcctgttttgtgaccaattatatggtcaattttggagaaggtcccgtgaggtgctgagaagaaggtatatccttttgttttaggataaaatgttctgtagatatctgtcaggtccatttgtttcataacttctgttagtttcactgtgtccctgtttagtttctgtttccacgatctgtcctttgaagaaagtggtgtgttgaagtctcccactattattgtgtgaggtgcaatgtatgctttgagctttactaaagtgtctctaatgaatgtggctgcccttgcatttggtgcgtagatattcagaattgagagttcctcttggaggattttacctttgatgagtatgaagtgtccctccttgtcttttttgataactttgggttggaagtcgattttatccgatattaaaatggctactccagcttgtttcttcagtccatttgcttggaaaatttttttccagcctttcactctgaggtagtgtctgtctttttccctgagatgggtttcctgtaagcagcagaatgttgggtcctgtttgtgtagccagtctgttagtctatgtctttttattggggaattgagtccattgatattaagagatattaaggaaaagtaattgttgctcccttttatttttgttgttagagttggcattctgttcttgtggctgtcttctttttggtttgttgaatgattactttcttggttgttctagggcgtgatttccgtccttgtattgcttcttttctgttattatcctttgaagggctggattcgtggaaagatattgtgtgaacttggttttgtcgtggaatactttggtttctccatctatggtaattgagagtttggccgggtatagtagcctgggctggcatttgtgttctcttagtgtctgtataatatctgtccaggctcttctggctttcatagtctctggtgaaaagtctggtgtaattctgataggccttcctttatatgttacttgacctttctcccttactgcttttaatattctatctttatttagtgcatttgttgttctgattattatgtgtcgggaggaatttcttttctggtccagtctatttggagttctgtatgcttcttgtatgatcatgggaatctctttttttatgtttgggaagttttcttctattattttgttgaagatattagctggccctttaagttgaaaatcttcattctcatcaattcctattatccgtaggtttggtcttctcattgtgtcctggattacctggatgttttgagttaggatccttttgcattttgtattttcaaaaatatggaacgcttcacgaatttgcgtgtcatccttgcgcaggggccatgctaatcttctctgtatcgttccaattttagtatatgtgctgccgaagcgagcacagtactctcatttctaattatgtgctttgtctgctaccaaggaggttcactaatataaaggaattggggtcataccattgaacttcaattccatgatcaatacaaattttcataagatcagtcaggtcaaagaaattgcaatgacaaccatcttcttccctttatagggctctgaaatttaatcctatcatctctcaattcttgccccttccttcctctcttttctccattttcctttccttctttttcttaccccttccctttctttctttccttttttatattcagaggtctctattactcagactgttctcaagttcctgagctccatcctctcttcttaagtagctgttactgtaggcatatattaccaccgttggctactctataattcctatacccattagccttaatcacttccggaactctaactcttccaggccatttattgtcagctattaggatatgttcagctctttatttgatccagacaatttttgtgccatgtttcttggcgactttacttttaccacatagagaatttaccaaatacttagacttaatttttttaaacatccccctctcttaatgataatttcctcttcatactatgttctcactcagatatttctctaatgtcagagtgcatatggatcatccaaatatctagtatgaagtgaggctgatgctgtctatgctatgagcattaaggttccatatttaggtttaataagatgacatctttttttttgtcctgattaagcttaatattctatccaactaaaaacactatcttgtatacataaacatgtggatgtagtttacatcttcaaagatctaccatctagcaaggtgtggtgaatatgtataattaaagcctgaacaatgtagtgaggctctgtctcaaaaacaaaaacaatccccaagtctcaaaacaccaacaccaccaaaacaacaataacagaacaaccacatgccctgcaaaaaacccaaaaaaccaaaataaaccaaaaaacctagcattcatatggtagagcacttgcctaggataggaagggctctgagttcaacccatactattgcaagaaatgaaacaaaatactgacaaatttaccaactaaaaccaaaacaaaataagtgaaccaaatctacctacctaccaacttaggctccaaggcatgtctttttctattgaaaattccattttattgtccttttatgttacaaaacctttccaaagaatttggctagtgttttctggaaggcaatggtgcactcaccatcgcttctaggatgcttcacagataataaggttgaatagcttatggaccttgggcaggcgcaggtgtcaggaaggtggtggacttctatgcttcgtgtggactccttgagcctttcaaacaaagactcttcaaagagtttttttttctttctaagtgacctgatcaatcacataatgattcttttctagagttttttttttttttctgaactagcttctaattcaaaagatggaagaaaacagttacttagatgattaaatgaaatactgtcctctttacctcactttgggtttattcaaccaaggagtacagcaggaagctgtgctttgttatttctgggagggacattgtgctgtgtatttaatttggccagaacagagactcagacaggcagtaaattccaagtgaggagaggcagcactttgttatcattccttagacaatgtccaagtgctgttaaatcatgcagattaggtaacattgagaatatttttatattttttaggtcacattaagaaacccttttaaatgtcaaaatttaaacaatacacatctgtctctttttatgtgtggttttgtttctaaatcatagtcacacaaaggcactcattaaagtgtgaagatacagattgaacagctgtgtgcctgcactgcatacttaacttagttgatgaaatggtaataattagtagtgaccattctggataccactgaatacatggcatataattgggatacatattcatgtatgtttgtattacatatcaaactttcttttcattttatactgattaaaaggatatctagagctggacagtagcgttgcagccgtttaattgcaccattttcaaggcagaggcaggaggatctctgtgagtttgaggctagcctgatctacagagtgagttccaggacatctagggatacacagagagactctttcttgaaaaagcaaacaacaacaaaaaaggaaacctagagaatttaagtttcctatgttctagcctagaatcatggatttaagattctaaaatttatttatttttcccactatatccaagttagaagttcttttagtgctaggcacaatataagataggtacttgtttctttattagctagagaagaattcttccttttccatcatgtgtttgaaatgaaagataacatatctgttatgattctagaaggcagaaaacatagtatgtgtccccgccatagaagtatatctgaacactgatgtatggatcatataagctcccagtagcatagtttcaactcactgcttctatatgaccattgacaagtcaagtaaacagtttcttgagcctgctgtgaaggacacagtattttagtcctgcaaacaacagaactccgagacagtataataggaccaattctgagggcttgaagtttgcagttagacctggaagatttaagtgagacattgtgagctgagtatcttacctgactccaattaagttccagtaaaaggaaactcctattgccattgctgtaggggaattgtcattataactctgtgaaagtctgaaatattatctaaaaacatctatgaaaacttaggggcaaaataagtaaagatatatacatcaaattttaactttcatgaaatttgtagtttaattcaaatgaggacaacatttttaaatttcaaaatcttgtcctggaacttaaaaaaaattgtattatcgatatattgtccaactgtagcaatattaaaagaattgtttgagatgagaaagataagagtgacttagttactaaatgcaatgagaattttagtttaatgtattgttaataaagatgcagtaagactcacagtcaatcaaaggaaataggacaatttgattaaaatatgaactattctctgacaaggattggggtccatctttatatatatatctgtaagatgcaattagatgaacagttctccttcagcattaaaaaagcaaggaaaagggctggagatgactcagtggtggtgacaggtgcttactgctctcctagaggactggagttcacttcccagcatctatgacaggcagctgtaggtccagttctgtggaatctgacgtcctcttctggcatcctcaagcagtcctacacatttaacatacactcaaacaaatacaagtataaataagaatcctttaaaagatgggcgaaatacaagctatgttagatacatattcttttctaataattatctgttaaaatattatattattagaaatacaggcaaaagaaaatgcacatcaataggcaataaattaaaaagaaattaattgatgaaagtattgaaacttttatgtcaatattgttactgataagatggtattaaaataggataaacttctagtcttccattacagtcattcagcatccaaaagttttgaaaaatgtaatgacgtatgtcattgatatcctgtaaattatctgatgatcaccaagtccacacttctgttaatttacttctttgtattggtaatttttcttccaaatgttttctcaatggtgtaagcaaaaattcatttcacttctttatttgatgtaacccctcccacataaattctaacatacagcctgttctggtctgaatgagttacacctcccatagactcatgtgtttgaaaccttggtcctctgtttgtgacactgtttgcggagactaaggaaccttcagacaatgaatgcttgatggaggaggtacgccactgggaatgggctttggtggtttagagccttgaatgcttcctgctttcactttgcttgctctgagcacatgaagcatggacagctaatttcttgtccctgctgctgttccctgctgctgtggctaagatggaaatgtaagctgaaataaaacttttttttttacttaaaaaagtaaatatgagttactgggttatagcaaaaacattagattggttttctttttcttttattttggtttttgtaatgttgatagttgactccaggacctcattgggttgtggagtgtgtgctataccacttagttataaccctggcactcacactgcatttcagaaaattctgcaaaattttaaattaattaacagtgacaatttaaaacttaaagttcattttctggtaaattgaagtgctaattttgtgatctcttccccttctccctaaggttggaccaggtatcatgtgtgtacttcaaagcttctgaatgcctcaattctcttaaatttgagaatcttgttaaaacaaaatgaagccttctttgaaggccctgcttactttgaaataaactggcatagactttgccacaattctaagaaaataggtcattgggcagtccaagaggcagataaaattagggagtattgccagctactggcatagtagctgccaatctacttctcctggaagatacttagctttctttaatttgaaacaaaatttctgaacttcagataatgctcaaggacagtgcattgtgatgcttaaaaactattttgatttttgaaaatcacaatggccttcaattaacagttgcagaattttaaacatgctttattgctgggcaaagcagtaaaaggcacaaggagaggcaatagattggaaaacattggaaggtgttttagaatttcatctgcttctctcccattctcaagacacatgaagaattgatatgattgtatatttcttatgctaacaaatatgctaacgattataaaaaaggaagcaaatgtcattttgaataagaaagatgttaaatagccattacaatcagtaacaagttagtaagaggcattacaactaagaggtgatgttaatgagcgattactatgctccagttattaaatgcttcatacatattaatttagtcacacaacagtcatttaaataatcatgatatttatattaatacttatattacagtatatttctcactttccaccaaagaaacagaggaaatgagagtttaggtaacttggtcacagtcacaattatgttataactaggcctttaacttgggcaggaggacctgggtctatgacaggacctggcagatgattttctgttttaatgtcacctttgagaaagaactatgtggcatttttctcttcataattcccccctcaaggctgccaagagcagttgaagaggcgtaaacatttcagttgtttattcattacagggatccttaattatgacttaaaagcaaatttccttcaggaagtcagattttacatcttcagaataaatcttttgattgcatatgttataattgtattagaatagtaattaggtcagttcgtagggaaacagttctctctctccccccatcattttaatgaaaatgcaatcttttagcaatgcatgagattgggtggtttcagctattgtgagactcatggcttctggttttcaaatggtatttccataaggttgtaggctggggcaggagtcggagacagaagatctatttgggacatgagaggataagcttgaaagaaaacaagtagacacatttccaaaaattccaacttcatatcaaaggaagaagttctcctttttctgcatttgttagattgaaatagaggttctactgcttgtaaaacgtatttgttccaggttaataattttgtaataagacaggactggaaagtggttttcatgcatgtttgtatgttttagagattacagaatggtctccttctttgttggaaattggttgtaggccataggctggtagaactagaaactaagtctactctagagcagagggagactttggtaagaggagtcatgtatggcctgcagggctcctctggggaggagagattaatttactgttaagagactaggctgtggtgtctgtgacccctcgggctctttcacaagagtctctgagctctgcctgatctttggctgtgggtctctgcatctgtttttctctgccactggatgaagcctcctaggaaacaattatgctaggctcctgcatgcaagcttagtagagtatcattaaaagtgtcagaagttggctctctcctatggaatgtgtctcaagttggaccagtcattagttggccattccctcaatctctgcttcatttttatccctgtgcatcttgtaggcaggacaaattttgggcttggctacaggaggtggccacttcactctccattgccccagcttctaggagtctcagatagggtcaaccccatagacttctggaagcctcctccattccacatctcccactagtcccagagatgccccacacagatttctgttctctctctcagccttctcccacacccctccgcacagctgatccccattcccattccctgtctcactccttcttctacccaggtccctctctccatctgcctctgatatctattttatttccctttctgagtgagattcaagcttcctaccttgggcactccttattacttagtttattttgggtctgtagattgtatcatggttatcctgtactttatggctaatgtccatttataagtgaatacataccatgtgtgcatttctgggtttgggttacctcactgagaatgatattttctacttccatctatttgccttcaaatttcatgatgttgttgtttttaatagtattccattgtgtatatgtaccacattttctttatccattcttcagttgaaggacatctaagttggttccagtttctggctattaccacaaaaaggtctacacagttaattaacctgggcccatgatagctcacagagactgaaccaccaactaaagatcatgcagtggctccacttaggactctcacaatttctagcagatgtgtgggtgccctaacaactggaacaggggcagtctttaattctgttgccctccagtggatctctttcctctagctgaattgcctgcacaggcttcagttggagaggatattagtcctgctgggactgatgtcctgggtcagggtagtacctaagggggcttccccttctctgagtagaatgtgatggagcaataggaggaggaatttgtgagggtagcacaggggcctgcaatagggatgtaaagtgaataaatgacaacatcattttgctaacttcaaaataacaaaaaaaatactagactgataattctgtgtagaggtcaaggttctttagaataagtcacacagttctggatttgggcagcagttggagtttctgtagttatgcttcttagaagttcttagaaataaacccagaaaaatgtattaaaattctgaataggtttgttaccttaccatggtggatccctattcaaaaacgaattaacttgagtagtgggagaaaaattgagctctgaaacaagtaaaaattaatactaaaattcagttagggtctagctgtatatatagttcagtggcagaatgtttctttctacgttcatggactctagttccatccccagtattgcaaaccaaaagtctacaaggggtgtttgcaatgaaagggaatatatattgtattcagtgctgaagtgaatatgtattggagacctgagcagacagggaacagcatttatgctgctgagcggggctatgaagtcggaacactgacagagtcaagggtccctttgacccacttgtcttctgagggtaggaacagatgtgagctctcttgggacatggctccaatgagaggtctaggaatggcagcaggggtatcatctgcgtgtttgttagatgtgacaggctctggttcactcttccagcagagattcactctcacattaggctttgggaatccttgctctaatttgaatccccccttagtcatttcaggaagagtccactagatgtcactcttgtaacctggtaacgggattgtaaatttcagttgggccttgcaagaatttccgaccaagatcttattattagatgatttccacccccctccccctcagggctactgatatacacactgattatttaaggtaaaattacctttcttctttggttcaaagtattcatagggattcctggaaacgattttcattttgttgaattaccactgctgttcactgtcttcccccaccccactttttgcaggagttggtctgtcattatataaccttagcatggggtatgctgctaattctttgagctgagagagtactactctgggctgcacacactaacatacaggcttgatctctgtggaaattgttgagactagaaaggaatgaaggctggactgtggaaatagcatcaacctgggatgtgcttgctggaggaagtgccagcctttctgcgatcttggaatgtctctagggtagttttataaagaagactatgtcttcccaggaaaaaaagtttaactataatcttgtagggagttagtttcaaccatggaatgaatgtaagcacatttgcaggtacagtaacatcctgagggagattttatattttgagagatgtatcaggtgcttatgaaaggacctgttaacagctggttaggtctgcatgttagaaaagacagttggacagattaaagaccatgctttagaaaagcccagcctgagaaagctagtttcttgaaataaaacaactacttgcgcagttcttccttagtctgatgtgggttttcatctgttgcaacaaatgtagcggaaaaaggaataaagtaacaggtgtgtgtatatctgactgtgtttcctgagcctgtgtatttccttttatggagggaggggcgcctgatttgtaacatgcatcgctaaatgaatgaaaatgtttactctaattaatttcagcaaagaaaaatgcctatccaccggaaagcaatatagctttagcttaaatgcgatcgtcgtttgttgggaaggcagttgggatgtttccttcaaactttaagattccttcctaggttgtttattaggacttgatcaatgggaaaggaattaattttacaatatttttcctaaaataattttttatgttttcaaagcagtacttaagttgcagaaaacatccctaaaatggttgtttccaattgtagccaccatgagaacttttactcctgtgaagatatggttttagttgaccatcctctttccagttgaatattgcccatcatttccttttgattgttactcctgaggcacacagccgccaaggatagcatcatatgaggacgtgctgtttggcttgtagcaggggcttgggaattaagtcctttgaagcactgattcattctgcagaagatcttcatttatttaatagttgaaaatactgtctgcctcagggttgtggtgatgaattggcacatcagtgtgttgaatgtctgtagcatagtgtctggtgtctactgtgtgtttagtataaatactatgtaccaaggtacttaacggtaccttttaaagtcatttctgtacctaccccagccacagacctatagttacttgcatttttcagctgttacaacagctcaacaactgtgacagaagcccctgttctaataatatacctttaccaaagagctccagaatatgcataagtctactttttcctcagcctgggaaatgtatccctgaggatgaaagggtgttagcaggatcagaatagccaaattgaagagtggtaggaagaaaatcaatcctagaacaaaagcagggagagaatttctccttacaacctacattgaaatcctaagtgaaaattcacttctgtgtttaaaatggtgatccagctcaatataacagcaccttataccacaggctagcctataggactgttagtagtatatcaaggctagcctatgatccaaatcactttttaaaggcattttttattagatattttcttcatttacatttcaaatgctatccccaaggccccctttaccctccccctgtccgctccccaacccacccactcctgcttcctggtcctggcattaccctgtatttgggcatataatcttcgcaataccaagggcctctcctcctattgatggccatctaggccatcctctgctacatatgcaacacagctctgggggtactggttagttcatattgttgttcctcctatagggttgcagacccctttagctccttgggtactttctctagctccttcattaggggctctgtgttccatccaaataactatttttaaggttggctttaaggagaaaagtaaaatgcaaatcggaatatcctgcttgaatttttgcacaatagattcctaattgcccctttttattgtgtttaatatgttgagatatgcccaaccccttttaagttcaggaaggacttctaggattttagtagtaataactcataccttgatgtttttggaatattacttgggtagaaactttccactctaagagagatactgaaaagctgtctgaaaaacaacctaagtccctttttgtgtttctaccatgaacagcgctgtgcagttcctggacaatggcttttgattattcgtgataaagactgaaaccagcatcagctgtgttcatatgctatttcagatggacaaggatacagagttaaacatgagcactatgaattagaaaaataaactcattttctttcttgctagagttttgaactacacattgtatttcttttttttccaatttttaaaaattaggtattttcttcatttacatttcaaatgctatcccaaaagtcccccataaccccccccacccccccaattcccctacccacccactcccacttcttggccctggagttccccggtggttaatattaatgtatacatttggcaattggttaaaatgcatctcataaaatcttaaaagaggggaaaaccatccccctccaatatgtcattattgtttccattgtaggagtcagattagttaagttcagtcctagttcaaagaaatggggccgggggggggggtggcgaggactagggaacaagacttataatggtgtcactgtgtagactgggaaagaatctgaggtttgtccagcaaatataatggtgcattgaggtggtgtgttaatgtggggggccggaaaatgagttcagtgtttagtgactctgttaagtagcagcttagggtttaacctaaaaattgggagaaagttgataagtgcagagaaagcatgggactcggtttgatccggacctctctagagctatggtcgcaggctgtggaaggagagggggagggaaggaattcagtgtgaagataccttagtgatgacagctaagctgttcatctagtcaggaaacccacagttctgccaaacagtgaaggctccagcttaccttcagatgggggagataaactgtgggatcataaaaagaacagcaagcaaggctcctcattccacctccctttcataagttttgcagtctgagtaaaaaactaatagacatccatgaaagctgatacttattggttgtgggactcggaaggaacttcagtgatgtgggaaaggagctccagggactaaacagccaccaaagagtacacatggtgggaatcatggctccagccgcatatgtagcagaggatggcccagttagccatcaatgggaggagagacccttgatcctgtgaaggctctatgccccagtgtaggggaatgccagggacaggaagagggagtgggtgggttgatgagcaggggaaggggtgaacggataggagtttttttggggggaaaccaggaaaggagataacatttgaaatgtaaataaagaaaatatctaattaaaaaaaaacccttaaaaattttgcacaaagaagtggtgaaacaggaggtgtataatacaaactgagataagaatgcagagaacagtgatgagagaatggttctctgtgaatgggacatcgtgctcaggaatactgtgctacttcagtgacagcggagacaacgggcatttcatctctgtgaatgagacatcgtgctcaggaatactgtgctacttcagggacagtggagacaacgggcatttcagctgttttcttttgaccatagcttatctgagtcatgggatttttttctctggaaagtgtaaacactgatatgtgtgcgtcattttgcctgtgatgctcagaagctttttaatatctcttggctttcaggctcttgctctattggtatagggaaaggctagtgaagttacagtaacactggaaaatcagacaaacccgtcttgtgagggaagtcatagcctgcaaccaaatgatctctcccatgtatctgtttcataaagcaagtagttatagaattagggaaataatacaattctaatgatttgagcctaagaccagacaaagactgatacacagaataacctgttactattatagtagggctcacaactcagttatgttcaacctgctgaacaggaacaaaacggaaaaaggtctcgacggattatcactttattttagagaatgggaccgtgatccacttaatgtgtgctttaagttaaaattggaagtaacgtttaacaaagtctgtaccttgtaggacacctggaaatgctttgaatatgttcatggaaggtcagaaaaatatgtcacatatcaaagatgaggagctcacaggaaaacttttgcatccattttataaagtaaaagaagctaaagtagtgggaaaagtgggcaaaagagtgttcaagtgagaaagggaaggcccccaagtgtgacaggtcaggtgtaaataagaagccactctggctataaaggaattcaagaaacagcacaaaaggcttggaatccagaaataaaagctgttttatccatgaaaggcagaaggtcaacgggaaaatcaatggaccttcttgatcagggtgctcccggggagacagaggatctggagactccatgaaggcttcactttggtctttgttgaaatgcagaatctccactgtcatcgtgccttttgaagcaaagaggtgagacatgtagtatcagatcaaatggttgtgagaacaggatgttctgcctcattgaaatggtggatataagtaaattgctgaaactttatgacattcatcacatgtgtctgaagaaactcaagagcaggcctaagtgtgtaaacacgcaattgcactgctgttcactattggtgaattctgtttactcttccttgctttctctttaagccttttgaggaggtcctacaatttgtggactgttgaatctgattcatactgatggatcccaaaagttgtaggatcacagggcacttggaataatgaattcagaaaagcattctgttttctataatacgttggagctgtttgaaaggaaaaataaataagaaccaggaagaaaacccaaatatcatttgtttagacttttaaagagctagttagaaagttttacaagaaagctatttcaaatagtgtcatcacgatttaagaagaatattttgccacatataggtattatagaagggtaagaaaggctaagtcagcctgctgctgcacagatatgcaaacaaagcctacaaatggacttagctggtcttcttaattaaataaacacatttatagatactctggaagaacaagacatagagtatccaagatcataggactaagctcttctggctgcagaacttctaaatcaacaagaataagcctttaaaagtttatataaggaaacaggaaagtggcagagaaatgctctccatttaggaaaaaagaaatcagactaaacttgtaaaagtgttgactcagaattagttagaaacctggttttctccaggaatgagcaaaggcattagactcattatagatgtcttctaagtaaagccaatgtgtctgtccatccttttggctttggtggtcatgtgtcaaaagtgaaaacagaatgaggatctggtttcaaatcttgactcagtcttcaagggcttttgtgaagaccatgtaaagcacacatgggagtatctgtttctatggcttgtggcaagcattgagaagtttcgaagggagctggttactgtagactctggctggaggaaaccattctaattctctctggctgtggaaaaccctgtgaatttttgcactaggttagtcactcaaattctctgctactcagctcacttagaattcactttttaaaaagggaataatttagttttaccagctgtcattatcctagaaatttatgtgtaataggaagctgcttttttttgtaatgtgtagattagcacaataatagagaagaaagagaactctagaagttctcaaaggaaacaacttcttgtatgatgcagaccagtaatacatagatgagataaaatctcaggaaaacctacaagacatagattaccaatttatgaactgaaatctttaagtttcatgttttacatgtatataatgaattatgatcatatctaccattgctctcccttttcagtcctttatggacaatcccaacagatactcctcttatttcatttccttttattgttttataaacactgtgtccaatcagcaaagcctatatgaacctggctctgggcaatgatggagcccaagatgaggaatggttcactttctggattggacctccttgaaggaccatcatggtcaatgttgcctgccactgaaggccatgtgtgagtcaatggtcctgatgtgaccgagctctgtgttgtctgtgacccatgttaccattgaagaaggccttgtggatgtttgtggtctgtgctgccgcatgaagccatgttgatgtctgtgggctgtgctggggtcatattaatgtgagtgacctccattgccacctgagtccatattgatacctgtggtacaagctaattctgagagcacatgtcatcattaatagaaagttggtggaaatgtagatggtgtaatacattctggggaggtatcagatagaagaaacaggaacaagccactgacaattagagaaaagtcagttaaaaaagtgtcatagacctttgctagattgtgtttgagcaccctcagaaggtagaatttgtgatccttaaaacttaagctgtggagatttttaaataaaaattttaagatttggcctgaatcatcctgactcttttattaaaactagaagaaaaagtttaactgaagaaacactgttaagcaaaaaatatgctgaaccttaaagaaacatacaaattgctcacattagagagaagggggggtagagcgagtaagcctatgaactgttgtccttcatttcatttatatttacgtattttgcatcttgaaacttgacaacaatttgggtaaattgtcatgaatatgcataaaaactatggtatgtttcctttctaccctttaaaaagtagttttattgaggttcacacacacacttcatgtaaaacatgcaatccaggggccttttgtttgttcactgaattatgtaaacaccatcacattttaaaacttttatcttcactcaaaaaggaatccctgtactattagtcatcattcttcatttccacactgccatttctcttctcactctcctccccactccaaagcctcagataatgtgagtctctgagtgtgagttgatttggggataggatggcatatgaggtttaacgtcaagtgtagacagactcccacatactgcttggtgaaaagatgagcctttcacagtgtgtattcttggcatttttataaacaacaaacaaacgacagttgttcccaaatgatggatttctctttctgatctttcaattctgtgtgtctgtttttaggccagaactatgctggttttgttactacaacttcatagtgtgttttaaattagttgttgccttcaaccttgttcttttgggctcaagatggctttggctatttggggtatcttgtgactttattcgaattttaggatttttttttaaaataaaaaaacctagttctagaagcatgtgatttatatatttcttccaactagaactgcattgagtcagtagattgttctgcacaatatggacatattggaaatgtttacttttatagtcaatgaacatgggtatctttccattcctttacatatattaattttctttcatcagtgttttacaatatttagaataatcttttacctattggttaaatttcatccttgttatttttaataaaagttatgttcctatttattttaatggaaagcttggtttgttttgagatccagcataatgttctgacaatagtgtgattctcaaagatagactttataaacgttgttaaataaattaacacaacatccttgtgggttagataataattatggtcagagttttgtatgcagttttagaaatctccctagaatatgtaaggtccagttttgccaacaatacatttttacacagatttaatgattagctgacaaaacatttaggatttgggataaaagtatagctctatttaatggcagctttaccaatttgtattttctttcataatttcttaataaatggaactaattatatacatctacttttaaatgagagataaattgtgatagcaggaaggttttaagattagtggcttccaatcattgatgcctaatggaaccacacaagaagttttaaaacaatactaaggttcaaaattctctagcaaaaatgattagattgctctgttgtaaggctggatattaaggactcttggaaaatattgaatgtgccataaatgaggttctcaaagtgtggccctaggcttgctgcatgacttgggaactttgaaattgcacttctgtatgcaagtataacacaatatcattaacagtgtcagagatgggctccctctcttgaaccaggttgcaagctctataagtcatttgttggatactccctcaatatgtgttttatctttactctggcacatcttgtaggcagggcaaactagaagtctggatttgtgtcccaatccctccatcagaaatcttgcctgtttacaggagatggctgattcatgctccatatcccccattgctaggagtcttagtttcatcattgtatattcctgggagtttccattgacctaggtttctagctcatcctagagatgtctttctccattcccattgtgtctcccagcactctctccctcagtcctcacacctgattcctcttgtttccatccccactccctctgctgtctagtgtcctcctacccctacattcatccatgatgtctattctatttccctttttcggaaagattcaatcatcctcccttggactcttcttttcacttaccttgtttgggtctgtggattgtatcatggttattctttacattatgcctagtatatacttataagtgagtacatatcatgtttgtctttctgtgtctgggttacctcactcaggatgatattttctagttccatccatttgcctacacttttcatgatgtctttgattttaatagataactaaaacttcattttgtacatgtaccacattttctttaatccactcttcagttgagattaaatgcattctcatctgtaggttgctttgtagagactagttcttccgtcacttccaaatttgcactgctttcttatgtagatggtatggaaaggtctataaccacactatgtgacaagtggaggcagagagatcaggaagtagtaagtttaaggccagtctggcctgtattaggctccctgctctctccctgttcctttctcccttcatatcccactccaagtgttgagaactgaatccatggggaatgctaggccaagtgtgtaccagtgaccttcatccctagtccaaccttgagtttgcttcattattaaattactaactttgaatctgaacaaccactcttaccaggaggttaaatgtgcttgatatatatatatatatatatatatatatatatatatatatatatatatatatatactgctgaagtaacacatgattttggtaactcaccattgctagatggctttattttcttagattaaaaaaaatgaccaacagagaaatttagtttggctgtgggcttgttttaatttaaagaaattatgatttttttttttttttttgctgtggttagatactgttttggactttgtaatttttgtgatgttccttccctgtgagttataaatactgggatatctatcatataggctgccacttatcgtcttcttttctacagttctggtgtcatcacatagcaaatacaatgattcatctctggtttaataacaacagtatacctttcagcacattctaaaagcagagcatgttaagtctactcttctcctcttttttggacatttccagtgtaccctataataatataaaaatgtgcatggcaatttctgtggttgtggaaatgctgatggattataaacgatgcattggaaggtgtgcagagcaacatgagtggaggtgccacgcggtccctgtcacaactgcttgcctctgctgacatggtgcaaaagcagctgtcggtgtaaacagatgagcttggcggagcttgaatgaaagtttatttatagttataagatcgactttcatgccatcttcatgtgtcatgaattacatttttcatgtgatattttactttggactatttttaaatatttagaaatgttaaacttattcttagcttgtgggccagacaaaaatgatgacaggcttgatttggacagcagattgagtagaagcttagagacataaagttataatacctaggtcttattttgagagtggccatatgaaggaataggaagccttaactttcttgtttcttttaaagtcccacatgtgtagatgctcagcatttcttttctgagtaagtgaacagaggatgctttctggcacatgatacagcaagggcaatcttctgggtgaaggaagtacacggtagcatgttatatgccttatgccatacaggaacttaaatataacacaactaaatggagttgttttgtcctagtttattttatagttatgtacatatgtacatgtctggaatgtattgtgatcatattcacccttgatcctagtcacagctcttctcctccttctgactccatgagatattttttctccctgagtagcctgaagaattgtcaatagttgctaatcattttgaccagataactaactataacttgaatcatattatttttgataattctgacatgaggaaagtataaaaaatgcaatattctggatttttctacagtattatttactgttagagtctatggcaaaaatcattgagttgttcaaaaacaatgagagaattttcaccaaggaaagaactttaagctgaagaaacaacttgcaatagaattttcccaatagtcaattttgcgttaggatattttaactgatcaatatgtgcactgtttaaatatattcaggatgttgtgtactttcacatttcttgtttatcttcataatagtaattatggggcctactgaattacttacaggcctattttacacattcttaggttgaagtcagaggcttcagtatgtgtttctattgcctgtggtgtggagctgtgtttccagaggcctttctgtgtagcagctgtaatccatgttctcttgtttactagagtaagactctaccagagatggtaatggcttcatacaatccctgttaaatttcttcctttggtgggacaacagtagaagtacaaccactcggggaggctgcattaaggaggggatgcctagctaacatcactgttgtagacaggtgcttatctcccatgctcagccttggtttctttctctgagaaggtctcaccttatctacatcagaacttggctgaaggatttgaatgagacagcacatgtttagcacaaagtgtagagaatggtgatggtagctattatttacattaaatgacacactttaccataacatttcttaatttaagatgactaggtgactgttgtcactgaataatacaatctcattatggacagagctaatggtaactacttacacatgtgcattttactagtcatagcatagcctgtgtgtctgctgtgcatgtgtgtgcaagagttttaaagccactgttttattgtagtctaactctgcttgaaaagtagtactgaaattttcattgatattttggagaaagaaaaacattcaaacgttattattccttcctttaattatccacaaatttttaattttcacaagttctgagagcctagcctcagcaagcacagaatcaatgaggaagaaccagctttgcgtttttgcatcagcttacattaggttgggagaaaattagctcgtgactgatgcattaacagtaagtatgctatgatacagacgtgttggctagtgggacttctcctgattctggaagacttgagaaacgtttctagatgaatgaaaacctgcagatcagcgaagtgtgaggagtgagaacaacatgaggggggggggtattctagtaactgatgaggctctttgatgccaggttctaatgcaaaacattagaacaaagctgcaaatatctttttatttattaatttattcacttatgtttacaaaacgtctgtagcattaaaggccctccctgtgctatttactatggaagtttcaaaggtgagtaatggaaacgttgtgaggagatcagctaggacttcgactaaaacatgaagcccaggatattagctaagggacttggaatgtgaactgatcactcacaagtctgctgggtctaccagttatacttgcaacaatgttataggtgttagcatttggactcagtgctgagattaagcaatatgtgaagatagacattgtccttgttctaatgggtcttgtaatcaggcaaggaagacttgttaaataaataattaaagcacatataatgagaattaattgaaaatgaacccaggattctcatcaatgagcatgactcttaaaggaaatagaatgtttatttatttactcactttacatcccattatcagctctacctctccttcttgtacctcctcatacggaacctcctttgcttcctctctccccttctcctttgataaggtacagccttcctctaggtatcatcttcatcccctactgctatcccctaacttctttctcagcttattgattgtttgcataaaggagggctggtgatttctttgagttaattttgtatccagtcaatttgctgaaggtgtttaacagctaaaggagttctttggtagaattttcaggatatactatcatatctgtggatagtgatactttgacttcttatatttgaattcccttgatatactttagttgtcttattaccttagctacaacttaaaatactatattgaagagatagggagagtggacagccttgtcttgtccgtattttagtggagctgcttcaattttatctccattaaatttgatgttagctactggcttgcagtgtattgctttatttgtgtttaggtatgcatcctccctgatctctccaagacctttaacatgaagtggtattggattttgtcaaaggcttttaaagcatctaataagatgataatgtggttaatgttgatggacattgaaccatcactgcattcttgggatgaaacctacttgatgtctttgatgtgctcctggattcagtttgtgagcattttattgagtattattgcatcagtgttcctaagggaaattggtctgaaatttcctttctttgatgagtctttgtttggtttaggtattagggtgactgtggcttcatagaatgagtttggcaatgttctttctgtttttatttgtgaaatagttgaggactattagcattagctcttctttgaaagtctggtagaattctgcactaaaatcatcttgtctggttttttgtttgtttgtttgtttgtttgggagactttgactgcttctatttccttagaagttatagaactattcagatagttagtttacctgatctcagtttaactttggtaagtggtatctgtttagaaaatcatccatttcatttagattttccatttttatggagtacaggcttttaaagtaagtcataatgattctttgaatttcctcactgtctgttgttgtgtctcctatttctgattttgttagtttgtgtcctgtctctctgccttttagttagtttggctaaaggtttgtctaccttggtgagtttcaaagaaccagttcttggttttgttgattccttgtattgttatctttgtttctaattgactgattttagctcaataaatgtggtatggttatttgatgctatctattcttcttgcctgtgcttgtttttttctgccctagggtctacagttgtactttcaattctgtagtgtgagaactttccagtttctttatgagggtacttagtactatgaagtttcctcttagcactgtttaatagggtctcatacatttgggtatgttatgttctcatttttgttgaattctagaaagtatttaatttctttctatatttcttccctgacccagtgatcattgaatagagagttattcagtttccatgagtatgtaggccttctgttgttagtccatgctgatctgataagattcatgggtttatttcaatattcttgtatctcttgaaccttggtcaatttttatatctcttgagcctttggtcaaatttgaagaagattcaatgagatgcttgtgtttgtgtgaaatgttctatagtcatttgttaggtccatttaaatcattacctctattagtttcattatgtgtttaatttctgtctcaatgacctctccattggtgagaatggggtgttgaagtctcctaatgttaatgtgtggggttttatgtatgatttaagctttagtaatgtttcttttacaaatgtggttgcccttgcatttggggcatagatgttccaaattgaaaagtcctcttgatgtatttttcctttgatgaatatgaagtttcttttcccatctcttagatactagaattattagatactagaattatgagtgcagctcgtttattatgtgtgttttcttggaaaatcttttcccaacccgttatgctgagataatgtctatctttgttgctgagatgtgtttcttgcacacaactggattctgcttatgtatcaccaggaataatccctattaatattaggatgtatatttttttcagtgaatgagagttggtgagagaagcagcattcattgccacggttcaccagatttggagtttttcacttcatagcatgggcagtattggttgaatttctgtcatgctaattggtcacgtcttgtataagcaagagaatggcagcacccctagcaccttcaaccctaaaatggagaaacgtatattaatatcttatgataacagtaagatttaaatgaaatgagtagctatagtggaggacctgataacatagttaaatgctctgtgaatggctgcatttcaaggtcaggactccttaaggagtgatatttagtttcctaactcatatattttgacacaatttttagcaattattcttaggcaacaaacctcaccttcttgtattgcatctcccataattaaaaggaatcatactgccttaattttaggaaagaattatagacactaatgacatcccaatggtacatgcttgtcattccagtgtaataccccctttcaggcacccccactctagtctcgggagtgagagagcaccaaaagaaacacaagaatccctccttctgtaaacacatgaggcagtttaatgatggagctccgggttgaaacatagctcatgcaggagacagtggattcaaccatgaggctcaaaagctaggggtttttatggggtaaggggcttaagggtagggaattcagcatagaattcagcatagcgacacactattggcttattcaaacatcagcagaaaaattacatgtacgtgcagggtgtcagagttctgtgagttgttgactcagttcagatagccctgttatgtcctcacattcctctttatctttatggtcaagctgttcccaggaatgttttaactacggggcatgcccaggtttgtttttttttttattctcagccccaggcagcctctatgctcacaaacaaccagcaatttctgagtactttatatgacttacaggtcttgaaatttcatctttctttcaccagcatttgggtgcaacagaaagatcttgatgctatagacagcatagtgtgtttgaagttagccctgtgcaacatagcaaggctttgtctttcaagaaagttttctttttactcttagagaaagatggtacatgcatgatgttttattacttttctcaaatgtagttttacagtaaaattgaaaatgcttcaatgcttcaaacctttctaagcccacatctcaaaagtgcatgttcatttaactgataaggtaatacatagatatttctcttgaaaacaataatcaatactttatatagcattaaggaacttttcttgccaatatttttgtgacaacatacggttgttacatggttgcatatgcaaatgctatgttcaagaatattttatttattataaaataaaaaactatttaaaataaaaaacaaaaataataatacttaagaaattcaactgcagagtctattctcatatgaacaagtagaaataaagaaataactaggtatttttggggggagaggacaaaagcttagtcacatcttcattgcactgggtcactgaggaaatctggagagccaatttcagagccaattccgtagaccattctactgcagttttgggagtgcaaagagaattgggtagagtgatcaacagcccaaagccccagcattacactcctgaactaagagcaataggggcattactattatcaattagcttggtgtgtaagcaatgtgtgagtacttattttaaatcatcctcaaaccaacagtgagcctctgttccctgttccccagctttaaggggcatttaatcttaattttagtagggattcctcctataggtccaagatcctgtgattggtgcttggagcaaaatatttactagtatctgtggtcattaggtccaaattagtgccttcttagatatcaattttgttgtcatttttggtgggaaattcttgtgaataaaaactattatataatttaagatactttttagcatctgcagaaaacaaagaaacaaatacataaattaaacaactttgcttcaagttccttagttgagctccctaacataggtatttcaatcctcctaaccaacccttttcaatttcggtatctggtggtggggaggttgttgtgccacccaagctggggagatctatgatatagtgggtttctgtgctttaattggagttttatgcagccattcagcttaaacataccactgtaacttggcctcttttttggaggtttgcacaatggcagctagtaggtctctttacttgtaggtcgcagccagactttctttaagcttatcttccatttgctgtgtatgcttttctcaccttcatactccactgtcacaccacatgcaggggtttttttttaaatgctgtaacactaggtttttggaaaaggatagtaaagaaaagacattccctttcagtcacttctgcattggtcctggaagcaggcgtacagtgtggtgacagaatgcagaagggttagatagaataggaaatgtaagccactaaatgtgcctcagtattctgaattactaaaagcagcgagaccaaaaaaaaaaaaaaaaggcgaacttatgtcttattaaattaccatacctctaaaacatttttcaatgttattagtaagtgaatgaatgattctgctttacttctgtataaacttctgtttaccatgagaaatctgagcttgataatttggcaaacaagacacataactacaaagtaagggaataattgtgagcagtgcagggctgtactgattgccatttgttttcttgacagaacactaacagaacacagaaaatcactcaagagactcctctccttgctctcttgttaatgttcctttctcatttgagaaattagcttattgcatactacagatatctcaggacactggggtttatttcccttgttgaatgttcattggttagtttcttgcagtgttataactagttgttgcaaaactgcaactaaccaatagttggttagcactatccagtgatcagttattgtttatctgctaaagttgtcctatgagacaattagagctatggcttaaagtcatcttctgctagaagagtatgatcataatatacactgttcaggactgttaatggattaaaaggaataatgcttagagagtgccctgacacttatgagtaccatgaaagggatatgttcatgtgttgagacacattaacatctttgtacctgatgatttgatgtttccttatgccttcctgaaacagagattttttaaaaaaattatttttatttacattctagctgttttccctctcctgtttccccttccacagtttttcatcccatttcccctaccccttgcctccgagaacttgtaccctccactaggcattccctttcactggggcctcaagtttctcaaggattaggtgcattgtcttccactgaggcaagaccatgcagtcctctgctatatatgtgcctggggactcacagacattttaatttccattttacagatgagaattatgaggcattgagaatttactttcccaaggggacactgcttataaagggcatatagcaaacagttgaaaactcagtaggaacacctctgcaaatatggacagaaaagattttgggcttatggcatgggtaaagcttgttgtgcagagttttgtcctgttcacgtctatccagtgctttcaactgaaaatgcaaaaaagattattaaaattgtaatcaaaagtatcccaatgtagagcctcaaaaattaatctttgtttacatctattgagtacatagtttacacctggccagtgtttatttttacctccttttatatagtactgaaaaatatgctgtagttacagacatttgatgaagcaggcttaataggcatgctcttgatgatgtacattttactttacttaggttaatgagtgagcttataatacaatgaggggattctggctttgggctcaaactccattttagtacaagtcatttgaaacaacacaagtcagaacattaaacattttaagttagcagatgttcttgtctaacttcatgttttatattttcagatcattatgctcagaagtaaacacaggacaaactcttatttggattatggataattaaaaataattcagttgtaaaggtttctttttttccagaaaaaccattcatggttcatagtagttataaatataaccactatagctatatttaaaaagggcatgcctgggagctgaacatagtgacttaaatctctagtcctggcacctaggaactaagataagaggattgagtttaagaccaggctgggctacatactgaatttagactggcctgagtaaatagtaaaatactacctgaagaaaactatatgtggccctctaaacactatgaagcctagctggaggcttgtagcttttcctccatgctggtcaagtaagttttccagatccctgtctgcttgtgctatcttcacactcccaggtctagttctattctcttagcctgcacactatgccagtctggtgagtgatccaccttcagcctgccgtttcagtctccactcctaggtctagcttctttgcaagtaacccagtctcccttccatttacacttccaagcctagataatatcttgatggttgtacactggcccagctaggagagtgcttcagatcctgccttctctcacctttcccatactttcaggcctagtttgggccttgaaacctttggaccagataagacaaacccaggaaaagtgacagtcatacactttctcagcttacagtctttgggaatcaatgtagtaaaagcagccctcttactaaaagcaatctacagattcaatgcaatctccatcaaaattccaacacagttcttcacagatcttgaaaaggcaattcttaatctcatatggaaatgtaatgcactcagaatagctactaaaacaattctgaacaataaaagaattactggagtgtagcagtacccaattggggatcaattagagtagcttaatttggcactgctaaactggagatatcaccatttctaatttcaagatatactacagagttatagtgataaaacctgcgcaatattggtattaaaaacagttatgttgtttaatagaattgaattgaagacttacacataaatccacacttacacagatacccgagttttaataaaaagagccatgaatacacactggaaaagacagcattttcaacaaatgatgttagtcaaactggatgtctgtatgtaaaaaaaagcaaatagttctaaatctaccaccctgcacaaaactcaagtccaagtaagtagatatactacctgacagaggacaaagggaggaataaccttgaacacattggcacaggagaagatattttgaaaataatatcaatagtacatgcactaataccatcaattaatacatggatcttgtgatactgaaaataaacaaaggtcacagtcatttggaaatagtggaagcctatagaatgggtagagacaaagaactcaagaaactagatatcgatcctgttccacagtgcctcatacacaaatactgccaagagagagctggccttccaggagtgcagacacacttgtgagcacaggtaagaccaccatttctgttcagagggacccacccagagccttcatgacacaggatcagaggagcagcctgggacaggatcctggtttccatctgcatcctggcgctgaccctgtgtcacagctctccatacccaaattcttccaggagagaactgggtcttctaggagtgctaacacacaggcttgcagagtggacaagccacagtcagagacaacaagaccagctaacactagagataaccagatggcaagaggcgagggcaagaacataagcagcagaaaccaagactacttggtatcaagtaggcatcaaatggacacggtggtttgaatatgcttggctctgggagtggtattattaggaggtatggccttgttggaataggtatgaccttgttggaggtaggctttgagaccctcatattatctatctgcctggaggatagtcagacttctcctgtttgccttcagaataatatgtagaacttcttagatcctccagcaccatgtctgcctgattcctgccatgcttcctgccttgattataatggattgaacctctgaatctgtaagctagtcacaattaaaagttatcctttgtaagagttgccttggtcacagtgtcttttcacagcaatggaaaccctaagatagatgccatgctcaatgagttgtgtaggtgtcgtcattggcaatgggacccttatgtcaatttgaggggaggaaaacattgtattagcaggagactggatgtttggggatttttacatgactcctttggtgaacaactcagttgaatgcaatccagttcaactactagaatcctactttgataacaagagatggtcagttaaaactccgtatccttcattactaggagacctcattaagattgccctcatatattttaagaagcttccactgcattgggtttccatactagcctgtaaatgtccctcaattccaacagtctctccttacattctttccatcaatactatctctcctccccattgccacgatcctgatcctctcatgcctgctccacccataaaatctattctacttctgcctcctagaaagatctatttgtccaccctagactcttcctctatatctaatctctctggctctatgagttgtagcttggttgtcatttattcaatgtctaatattcagatataaatgaatatatactatatgttgtagttaatatttgatctcagattgggatttctactccacctttgattatttagttcccagatgaaagacacacaccctttataattataataattcttgatcagcactagagctgggcaaatatccactttcctgcctataactctgagttataacttgctgtgttctatgtggtctgttcttaactccaattggccagtccccatggccatgttttcataacccaccttccccatggtgtctctcttctctctaccttcttcccttcttcctcatggtatctcctcagatcctgaatacaggaacccaaactctctctctctctctctctctctctctctctcttctgctcagctttaggctataggtatctctactcaccaatcagggataacttgaagaacaaagttacaaaacatcacttgtgaacgtacagatttctcatccctgggggcaaccaagccttggggatcgatatttagcattataatacatagcaaaagacaaagcctcaaaatatttacccttctgggtctggattgtatcactcaggataattttttttaagttacatctgtttgcctacaaatttcatggtgccattgtttttaacaattaggtaatacaccattatgtaaatataccatattttctttatccattcttctgttgagagaaatctagtttgtttctagtttggtgctattattaagaaaggagcaatgaacatggttgaacaagtgtccttgttgtaggatggagcatcctttgagtatatacccaagagtggtatacatggatcttaaagtagatcgtttcccaattttcagaggaactaccgtatttatttccatagtgactataatagtttgcacttctaccagcagtaaatgagtattccacttatccagcatccacactagcataaggtgtcacctgtcttatcagtcttagccattttgagaggtgaaagatggaatctcaaagtattttttaattgcatttccctgatgtctaaggaaattgatgttttaaatgtgtttcttatccatttgagattcttctcttgataattctgtttagatctgtacctcatttttaactggattattatttttattttgatatctagtttctttttaaattttttattataataaaatttattttaaaatatagaattcagaatttatatagtcaattctggagaaggtaacatgaagtgctgaggagaaagtttattcttttaggataaaatgttctacagatatctgttaaatccagatggtccatagcttctgttagcttcactgtgtctctgtttagtttgtgtttccatgatctgttcattaatgagagtgggatgtttaagtctcccactattattgtgtgaggtacaatgtatgctttgagctttagtaaaatttcttttgtgaatgtaggtggccttgcatttggagcatagatattcataattgagagttcatcttggtagacttttttttttcctttgatgagtgtgaagtgtccttccttatgctttttgatatcttttgcttgaaagtcgattttatttgatattagaaaggctacttcaccttgttttttgggaccacttacttggaaagttgttttccagcccttgagtgtctgtctttgacactgagatgcctttcctgtatgcagcaaaatgctgggtcctgtttacgtatccagtctgttgttctatatctttttactggggaattgagtccattgatgttaagagatattaaggaataatgattgttgcttcctgttatttttgatattatttttatgtttgtgtggctatcttcttttgggtttattgaaagaagattactttcttgctttttctagggtgtagtttctctccttgtgttggagttttctatctattatcctttgtagagatgaatttgtggaaaaatattgtgtaaatttgttttcaacatggaatatcttgctttctccatctctggtaattgagagttttgttagatgtagtatcctgggctggcatttgtgttctcttagggtctgtatgacatctgtccaggttcttctagctttcatagtctctgttgagaagtctggtctgtgtatgttacttgacctttttcccttactgcttttaatattctttctttgttttgtgcatttggtattttgactatcatgtgacaggaggaatttttttttttctggttcaatctatttgaagttctgaaagcttcttgtatgtttgtgggcatctcttgctttaggttagggaagttttcttctacaattttgttgaagatatttactggtccttcaatttgggaatgtcgaatctcttcaatacctattatccttaggtttggtcttttaattttgttctggatctcctgtatgttttgggttaggagctcatttcattttgcattttcttcgactctggtatcaatgttttctatggtatcttctgcccttagattctttcttctatctcttgtattctgttgatgatgcttgcatctttgactcctgatctctttcctaggttttctatctttgtgatttctttattgattctatttccatttttagataccgggtggttttgttcaataccttcacccatttggttgtgttttcctataattctttaagggagttttgtgtttcctctttaaggtctcctacctctttacctgtgttctcctgtatttctttaagggagttatttatgtccttcttgaagtcctataccatcatcataagatgtgattttaaatcagagtcttgcttttctgttgtgttgggggtatgcagggctcgctgtggtgtgggaactgggttctgatgcctacatggagccttcaactgtacatagtctagtgtgtttagtgcatgaaggtgttttgctgcctaccaaaagagtatcataaatgccaacccaatcacaaaaccttttacctacaatctgttctgcctacaaaatgtgctcgggcaatggtaacatagaagttgtgggaatagccaatcaatgtctgatttggtttaaggcccgctccatgaataggaaaccatatttgatactgcttgggtgaccaaggacttgagattagataacctagagatcaaaagtaaccactaaacactaatggttaaaaaaaaagtatcaatgaaataactcctaatgatattctgctatattcatagatcagtgccttatccaatcatcaacaaagaattttcttcttgcaacagccaggaacagatacagagacccaaagccagacattacatggagagagagagtctaagtgggatgtatccactaaatctctcctctcagaggtcaaggaaccctgtgaaagaggagctggaaagattgtaatagccagagggtatggaggacaccaggagaacaaggccctctgcacaaaggaatccacagagactgaagcaacaagcacagggtctacgtgggtctgtactaggtcctctgtgtatatagtatagctattttagcttaatattttttatggaactactgagtgttgaatcagtaggtatttaattcctgtgcctaccatagtcattgttttacttgtgttgctttgccttttccagctttgacattatggtttttgcttaatcttatattttatttttgtcatgttttcttgtgatctcttagaagcctgttcttttctaatgagaaatagaaatgaaatggatcaaggggggagaggagaggggaggaactgggaggactagagggaggagaaactacaatcaggatactctgtatgagaaaataatctattttaaataaaaggaaaaaaccctggtatgtccacataaacaaaatcaacatgaagtatctgaagaactgacttccagatctccacacctgatctgaaatcagtcagcacggacagccacaaaaacaactaaacttctagtcaacaagaggcaaggggaggctacaatctcatatcaggcacacacccactgaaaaaattcagatgcctacgtaatattgtaaaaacacaaacgtatgaaagaccaagacaacaaaaggtcaaacacactagttcgattggaatgttctgcaatgagaattacttagacgaacccaagggcacaggatttaaaagaatagtcataaatacaataaagtaatttgaggaatttaaagaggacataaaattttagtgagcttaaggtggagagaaacaaatgcctatttatggttcaagaaaacacacatatagctgagctaaatgaagacaattcagaatttgaaaactggactctataaagagaaatactaaagaaaaatcaaggtgaaatgaaacagaattgaaaacctcatcaacctctttagaaaactcagcagaaaccttagctgcggcatggattaagtagggcatagaccatcaggactttaagatgtagtacaggaattgcatcactcaatcaaagaatgttatttaaaaacacactataggcacatgcagaatcttttgggataccattaaaaacttaggagttatagtaagacgaatcccaagccaatggcagatcctcaaaaggatcataggaaaaaaactctccaaattaaagaaagacatacccatacagaaacaaagagcacacaacaccaaatagataaagccagaaaagaaacttcccatggcatattaaaaattaagacactaaatatacagaacaaagggaggatgttgaaagctgcaagagaaagaccacaggttacatatgaagtaaaacccattagtataacagattatttctcagtagaaatattaaaagtcagaagaacatggaacagtgcgctccaaattctaaaagaccgtgaatgtcaactgagactatggtgtccagcaaaactatttgccaaagctgaaagagaaagaaaaaactttctttgatagaaagagaataaaagaattcatgtccacaaaacctgtcctgcagagagcactggaagcaatacatcatactgaagacaggaatagacatactcaggagacctcagaaagagaagttatgattactgagacacaaaatgttctaaaaacaagtagtatgatgtgacaggtagggtaccctctcagaggagaagaggatgggggatggaggagggcctctgtgaggggatacttggagggcaatatttgggacataagtaaataaaaatataagttaaaaaaccttttaaaaaagaagacaaaccaacccacaccttttaaaaaattaatttacatcccaaatgatggcctctctccagttctcccctcacagattccctcctgccatatcccctcccctgggtatctacccaccctggcacatcaagtctttgcaggattagacacaccctctcctagggaaaaccagccctctgctgcatatgtaccagggcactcagtccatcttatgtgtgctcctttgtttgaggctcagtctctgagagagctacaaggggtacagtttagttgacattgttggtctttttgtgggcttcctatcctctttagggtcttcatctatccccccaactctttcataagggtccttgacctccatccagtgtttggctggggttatctgcatttcttatagtcaactgcaggatagagcctctctgaggacagttatgatagcctcctgtctgtaaacataacagagtatcgttaataggttcagggattggtgcttgcccataggatgggtctcaaattgggttggttgtttgttggtcatttgctcagtctctgctccatctttgcccctccattttagatagatattttgggttgaaagttttgcggatgggttggtgtccttatccctccaccggggcttctgcctggctacagaaggtaggctctttgggttccatgtctccactgttaggcatctctgctaaggtcacccacattgactcctgcaagtctcccatatctgagatctctggggctttctagagatcctccccccaactccctatctctggcaactgcagatttccatacattctcctagccttctggtctctcttgtctcttcccacacctgatcctgcctccctatgttcctccacctcccttctcccatgcaggttccttcctcagtctgcctcctatgactattttgtttccccttctaagtgtaattcaagcatcctcatttgggccttccttcttttttaccttctttgggtctgccaacacaaactgttcaataatagctttaaacattaatgacctcaactttctaatcaaaggacatatgttagttgaatgtagtaaggaaaaaaccacaccattctattgtgtacttagaaggataaatacaactttagcctgaaataatggaaaatacatttaaagcaaatgggtctagtaacatagcagctgtctgatttacgacaaaatagacttgaaactaaatcagaagagagaatgaaaggacacttcattttgattaaagtaataattaacaaagaagatatttaaaacccaaataggtatgcatcaaactctggagcacccaactccataaaaagtgtactattggcccttctgatccagccagcaccggggtagctagggtgcagagtcggctgacacctgccagctacccacaagacctgccacaggcccttaagacctctggtgagtggaacacagcatctgctccaatccaatcacacgggacctgagactgcattaattagggaagcagaaaacccggtctgatcaggggcacaagtcccttccggtccaggccagcacaggagtaccttgggtgtggagtctgcggacacccataaggtatacataggaccctctatgggatcttaagacctctgtgagtggatcacaacttctgccaggaggcaggttcgaacaccagatatctgggcaccttccctgcaagaggagagcctacctgcagagagtgctctgaacactgaaactccagagagagctagtctcccaagtctgctgatagaggctaacataaacacctgaggagcaaaaactaaccagagacaactacaacaactaactccagagattaccagatggcgaaaggcaaacgtaagaatcttactaacagaaaccaagaccactcaccatcattagaacgcagcactcccaccagtcctggacaccccaacacactcaaaaaactagacccagatttaaaagcatatgccatgatgatggtagaggacatcaagaaggactttaataactcacttaaacaaatacaggagaacactgctaagcaggtagaagaccttaaagaggaagcacaaaaattccttaaagtattgcaagaaaacacgaccaaacaggtgatggaattgaataaaaccatccaagacctaaaaagggaagtagacactataaagaaaatccaaagtgaggcaacgctggagatagaaaacctaggaaagaaatctggaactatagatgcaagcatcagcaagagaatacaagagatggaagagagaatctcaggtgcagaagattccatagagaacattggcacaacaatcaaagaaaatacaaaatgcaaaaagatcctaactcaaaacatccaggaaatctaggaaacaattagaagaccaaacctatggataataggagtagatgagaatgaagattttcaactcaaaggaccagcaaatatcttcaataaaattatagaagaaaacttcccaaacctaaagaaagagatgcccatgaacatacaagaagcctacagaactccaaatagaatttaccagaaaagaaattcctcccgacacataataatcagaacaacaaatgcactaaataaagatagaatattaaaagcagtaagggaaaaaggtcaagtaacatataaaggcaagcctatctgaattacaccagatttttcaccagagactatgaaagccagaagatcctggacagatattatacagaccctaagagaacacaaatgccatcccaggctactacacccagccaaactctcaattaccgtagatggagaaaccaaagttttccacgacaaaaccaaattcacacattatctttccacgaatccagcccttcaaaggataataacagaaaaaaaatacaaggacagaaaccacgccctagaaaaagcaagaaagtaatctctcaacaaaccaaaaagaagacagccacaaaaaacagaattccaactctaaaaacaaaaataataggaagcaacaattactcttatttaatatctcttaataccagtggactcaattccccaataaaaagacatagactaacagactggctacataaacaggacccaatattctgctgcttacgggaaactcatgtcaggaaaaagacagatactacctcagagtgaaaggctggaaaacaattttccaagcaaatggtctgaagaaacaaggtgtagtagccattctaatatagaataaaattgacttccaacccaaagttatcaaaaaagacaaggagggacttcatactcatcacaggtaaaatcctccaagaggaactctcaattctgaatatctatgctccaaatacaagggcagccacattcattaaagaaactttagtaaagcttaaagcacatattgcacctcacacaataatagtgggagacttcaacacaccactttcatcaatggacagatcatggaaacagaaactaaacagggacacagtgaaactaacagaagttatgaaacaaatggacttaacagatatctacagaacattttatcctaaaacaaaaggatataacttcttctcagcatctcatggtaccttctccaaaattgaccatataattggtcacaaaacaggcctcaacagatacaagaatattgaaatcgtcccatgcatcctatcagaccaccatggactaaggctgatcttcaataacaacataaataatggaaagccaacattcacgtggaaaatgaactacactcttctcaatgataccttggtcaaggaaggaatagagaaagaaattaaagactttttagagtttaatgaaaatgaagccacaacgtacccaaacctttgggacacaatgaaagcatttctaagagggaaactcatagctctgagtgcctccaaaaagaaactagagagagcacacactagcagcttgacaacacacctaaaagctctagaataaaaggaagaaaattcacccaagaggagtagacagcaggaaataatcaaactcaggggcaaaatcaaccaagtggaaacaagaagaactattcaaagaatcaaccaaatgaggagctggttctttgagaaaatgaagaagatagataaacccttagtcagactcactagagggcacagagacagcatcctaattaacaaaatcagaaatgaaaagggagacataacaataaaccctgaagaaatccaaaacaccatcagatccttctacaaaaggctatactcaacaaaactggaaaacctggacgaaatggacaaatttctagacaagaacacatcaaaacaatcatccatcctgaccaaataggttttattccagggatgcagggatggtttaacatacggaaatccatcaatgtaatccattatataaacaaactcaaagagaaaaaccacatgatcatctcgttagatgcaaagaaatcatttgacaaaatccaacacccattcatgataaaagtcttggaaagatcagaaattcaaggcctctacctaaacatgataaaagcaatctacagcaaaccagtagccaacatcacagtaaatggtgagaagctggaagcaatcccactaaaattagggactagacaacgctgcccactttctccctacctattcaacgttgtacttgaagtcctagccagagcaattcgacaacaaaaggagatcaaggggatacaaattagaaaggaattagtcaaaacatcactttttgcagatgatatgatagtatatataagtgaccctaaaaattccaccagagataaacagctttggtgaagtagctggatataaaattaactcaaacaagtcaatggcctttctctacacaaagaataaacaggctgagaaagaaattagggaaacaacacccttctcaatactcacaaataatataaaataccttggcatgagtctaactaaggaagtgaaagatctgtatgataagaacttcaagtctctgaagaaagaaattaaagaagatctcagaagatggaaagatctcccatgctcatggatcggcaggatcaacattgtaaaaatggctatcttgccaaaagcaaatctacagattcaaaacaatccccatcaaaattccagctcaattcttcaacgaattagaaagagaattctgctaattcatttggaataagaaaaaacctaggatagcaaaaattcttctcaaggataaaagaacttctggtggaatcaccatgcctgacctaaagctttactacagagcaattgtgataaaaactgcatggtactggtatagtgacagacaattagaccaatggagtagcattgaagacccagaaatgaacccacacacctatggtcatctgatctttgtcaagggagttaaaccatccagtggaaaaaagacagcattttcaacaaatggtgctggcctaactggaggttatcatgtagaagaatgtgaattgatccattcctatctccttgtactaaggtcaaatctatgtggattaaggaactccacataaaaccagagacactgaaacttatagaggagaaagtggggaaaagtctcgaagatatgggcacaggggaaaaattcttgaagagagcagcaatggtttgtgctgtaatttgagaatctacaaatgggacctcataaaattgcaaagcttctgtaaggcaaaagacaccgtcaataagacaaaaaggccaccaacagattgggaaaggatctatacctatcctaaatcagataggggactaatatccaatatatataaagaacttaagaaggtggactccagaaattcaaataacgccattaaaaatggggctcagcgctataataaaagaattctcggagactcgagccccgggctaccttgacagcagagtcttgcccaacacccgcaagggcccacacgggactccccacggaaccctaagacctctggtgagtggaccacagtgcctgccccaatccaatcgcgcggaacttgagactgcggtacatagggaagcaggctacctgggcctgatctggggcacaagtcccttccgctcgactcgagactcgagccccgggctaccttgccagcagagtcttgcccaacaccagcaagggtccacacgggactccccacgggaccctaagacctctggtgagtggatcacagtgcctgccccaatccaatcgcgcggaacttgagactgcggtacatagggaagcaggctacccgggcctgatctggggcacaaaccccttccactccactcgagccccggctaccttgccagctgagtcgcctgacacccgcaagggcccacacaggattccacacgtgatcctaagacctctagtgagtggaacacaacttctgccaggagtctggttcgaacaccagatatctgggtacctgccttgcaagaagagagcttgcctgcagagaatactctgcccactgaaactaaggagagtgctaccctccaggtctgctcatagaggctaacagagtcacctgaagaacaagctcttaacagtgacaactaaaacagctagcttcagagattaccagatggcgaaaggcaaacgtaagaatcctactaacagaaatcaagaccactcaccatcatcagaacgcagcactcccaccccacctagtcctgggcaccccaacacaaccgaaaatctagacccagatttaaaaacatttctcatgatgatgatagaggacatcaagaaggactttcataagtcacttaaagatttacaggagagcactgctaaagagttacaggctcttaaagaaaagcaggaaaacacagccaaacagatgatggaaatgaacaaaaccatactagaactaaaaggggaagtagacacaataaagaaaacccaaagcaaggcaacgctggagatagaaaccctaggaaagagatctgnnnnnnnnnnnnnnnnnnnnaaggagtttggagctgagatgaaaaggatggacccatgtagagactgccatatccagggatcccacccccataatcagcatccaaacgctgacaccattgcatacactagcaagattttattgaaaggacgcagatgtagctgtctcttgtgagactatgccggggcccagcaaacacagaagtggatgctcacagtcagctaatggatggatcatagggctcccaatggaggagctagagaaagtagccaaggagctaaagggatctgcaaccctataggtggaacaacattatgagctaaccagtaccccggagctcttgactctagctgcatatatatcaaaagatggcctagtcggccatcactggaaagagaggcccattggacttgcaaactttatatgctccagtacaggggaataccagggccaaaaagggggagtgggtgggcaggggagtgggggtgggtggatatgggggacttttggtatagcattggaaatgtaaatgagttaaatacctaataaaaaatggaaaaaaaaaaaaaagaattctcacctgaggaataccgaatggctgagaagcacctgaaaaatgttcagcatccttatttatcagagaaatgcaaatcaaaacaaccctgagctcccacctcacacctgtcagaatggctaagatcaaaaattcgggtgacagcagatgctggcaaggatgtgcagaaagaggaccactcctccattgttggtgggattgcaagcttgtacaaccactctgtaaataagtccggtcgttccttagaaaattggacatagtactaccggaggatacagcaatacctctcctgggcatatatccagaagatgtcccaaccggtaagaaggacacatgctccactatgttcatagcagccttatttatagtaaccagaagctggaaaaacccagatgtccctcaacagaggaatggatacagaaaatgttgtacatttacacaatggattactactcagctattaataagaatgaatttatgaatttcctaggcaaatggatggacctggaggacatcatcttgagtatggtaacccaatcacaaaagaactcacatgatatatacttactgattagtagatattagtcagaaacttagaatgcccaagatataagatacaattcatgaaatacatgaaactcaagaaggaagaccaaagtgtggatactttgccccttcttagaattgggaaaaaaacacccatggaaggagttacagagacaaagtttggcgctgagataaaaggatggaacatctagagactgtcatacccggggatctatcccataatcatcctccaaacactgacaccattgcatacatcagcaagattttgctgaaaggaccctgatatagctgtctcttgtgttactatgctggggtctagtaaacacagaaatggatgctcacagtcagctatttgatgtatcacaggacccccaatggatgagctagagaaagtacccaaggagctggggggatctgcaaccttataggtggaacaacaatatgaactaaccagtacgccctggagctcatgtctctagctgcatatgtatcagaagataggctaataggctatcagttgaaagagaggcccagtggtcgtgcaaactttatatgcctcagtacaggcaatgccagggcgaagaagtgggagtgggtgggtggtggttgtgtggcggagggtggggttgaattttgggatagcattggaaatgtgaatgaaataaatacctaattaaaatacttggatcaattaaaaataaaccaaacccaaatccaggacgggaagaaatgttaaaagccagagaaaaattaatgaaacagaattaaagataacactattaataacaatataaaagctggttctttgaagagacaagcaagctcaacaaacccttgccccattaatgtaaagaaagtatgaggagtcctgaattagcagaatcagagatgaacatgaaatttttacagaagacatcaaagaccttcagaacttaaaaacctatactccattagtttggaaaactgatgtatctgaaccaattaagttaaatcaagaacagatcaattagatcagtaaccaataaggagaatgaaatacttgtaaacggcctcccaagagaaaaagccaggtccatttgtaatcatcacaaaattctatcagactttcaagttgtaaccaatactttttaaattattaaaaaaattagaagtagaaagaccactttaacacacctcctatgaaggtactattattctaaaacagaaaagaaaattactggttaagatctttaaagaatgtagatgcaaaaattctcagtaaaataactgtaagtcaaataagggaataatacagcaaaaagaacatctaccacattcaaatcggcttttttccagacatgcatggatatttcaaaatacataagtcactatatatatcatacaaatggaatttatatcaaataaatggaattaaaggcagaattcttatgatcatctcagtatatgcaaaaaggcctatgataaaattcaacatgtcttcaagataaaagtcttagagaaagtaggtatataaggaacacagctcaacaaaataaaagttataaatgacaaacccacaatcaacatcatccttgatggcaaaatattggaagcaatctcattaaaatgtggaataagaaaggggtattctgtattctcccccacttactttttatataggacttaaagccatatctcaaacaataaggaaaggaaattcagtgatactgatagcaaaaacaactaaattactaccacttatagatattataaatattcataagatgtaaaacttctggaaatgaagagcactttcagcaaaggagcaggaaaaagcaaaactaaaaaatatttttacattttctgtatattattaacaattatgctgaaaaagagatcatgaacataccctccactcacaatagactcaaaaataataaaatatttagcaataaacctatccaaaggtgaaaaatctgtacaatgaaaattttaaatctccgaagaagactgaggaagacattagaagatgaaacatcctcttataatcatggattggtagaattaatattataaaaatgaacaacttaccaaaagcaatttatatatttaatattgtaaaaatgtacatcttactaaaagcaatttgcaaatttggttcaatcccagaaaatattctcatgacattcactcttttcataaatagaaaaaatttaaaatttatatgggagcacagatccatgatattatatactacacagagacatacacacagacccacagaggcccacacattcacacactgcatattgccttttattatcttgagatatgtcctttctatatctagattcttcaagacttcttatcatggctggacattggattttgttataggtactttcggaatataatcagacgatcatttttgaatgtttatgtagtgtattgtatgtattgatttatatgtgccaatggaatgaagttgacttgatcatggcttataattttttggtgtactctagaatttggtttgccagtatttctttgaaaaatattcaatttgtgctcatgagagagattggtctatgagttttttctttgttgttgtggaatctttgttcctttttgagtcttagagtatctttgacttcctggagtaacttaaggaatattggcattcttttttgaaggtcttgtagaattctgtattgttttcatcttgtcctggcttttgggaccaaaaattctgtgaaattgggtctcttagaaatgacagagaagctaaactcatgataccccaattatatggctgcctagataagacctgaacactgacaacagtaagagacgtgtgaacacatggggaaatcttctgagaaatgggaagattagtttttctcggggatgagccccctgttggttatccaatatacagttattagcccagaaattatcttcagataaccaatactaaatgggtacatcagaattcatataaagtcctgtaacaaaataaaatataaaaccaaaccaacacattggaataaaacaaaacaaaaggggaaattttctctcagaggcacaagaagcaaatataaacacagagatccgctcatttgcacactcaggaatcccataagaacactaaattagaatttgtaatgtatacacaaaagacattttttgtaatgctgtttttttaaaagtatattgttatgattctctgaattttttcaatatctcttgtattagttcccctttcatctctgattttattaatttgggtccttcctccctttcgtttagttaatttgcctaaagatttgtcaatcctgttaatcttttcaaagacaaaactcttcatattattgaatccttgtaattttccatttagttttaattaattccatctctgattctgatgatctttttccatctcctcttttgtgcactgtgttactgtgtccacggtcttcaagatgcagagttatgtttttaatgagatctctctagttgtttgatgtaggcacttagtgctgaaagctcctctagagattgcctttactgtgtttcatagatactattatgctgtgttttaattttcaatcaattcttgtaattaaaaaaaatccttcttgttttcttgacacaactttcatttggtagtgagctggtcagcttccatgaggtcatttacactattgatatgcagattgtttttattgtggtcagataatacacagttatttcagttttgtgaaatttcattggacttattttgtgtcccaatatttgctcaattttagtcaaatttagtgaaagctacatgggtttagcatttatatggaatctttggtacaactctgttatatccatttgatttatgatatcacttaactccagaatttctttttgttttcctctggataaccagtctattgatgaaagcagagtattgaggtaatctactagtcctctttctgggtgagtttataattttagatctagtagtggttattttataatattggtggatcctatgtttggtgtataaatatttagagttgtagtagtctcttgacggattttctcctttagtaagtaggaaatgtttttttgtacctcttctatgaaggtgtttgtcttcttatttctgttcacttttactgtccattctaatatggcagcatctaaccttgatggtgagatattacttagaggtagcaaaatgttaagtcctgttttggaatccagtgtgttagtgtacatcttttaagtcgataagtgagaccatttatatcagcagttattattgagagttaagaaatggtgtgaacatttacagatttctttgattatctgattcttttaatgactgttataatgcaaatagtacaggaacacatagattcatctgggcatacagatgcaaacatttcaccaggcctctgagacatgagtgttagaaatatgctggtttcataggatattctagggctggagaaaatagagactttacattcctctgacatgcagggcaccaaagatagtgtgtttatatttcacatttaagtcaggtgtgttggatcactcattgacaacacatctgaattcaggtgtgtggaggaaaaagaaagtaaagtaactcttgcgaatgaatgtggtaaaaacaaatgaaggcagcagtgaatgattatactcgctctttaagtgcttgagttaagaactacagcaaaagataatgatgtcatgttctaaggagtctatataaattgtagtaacaactctgtgagtgctggggaataagatggagacagctgaaagacagtcttggtgcttttgtctgtagctgctgagatatgtactagaagagaaaatttcctacatactactgcttctcaaacttgaatgcttatgtcatttggaaaacttaaaatgatgcagtgatctctaggaaagacatcagattagctgatgtggtctggtgattgttcatctgtatgattcaaatcttacaattgatttgactgccagcaatggctgagaaccatttctgtaggccagtggtcagttaacagctttttaactaaagctacagatagtaactactttaagtgtggtaggtttagctaattaattgtcacactacaaaaggatcttattgtaaatgaataagagaatctatgcttcaaaattattttttattttaaatttattgtattgctaatttttcaactgacaattgcataatgtgcatttctatagcataacatgacatcatctaatatgcatatattgtggaatgtcttagacaaagtaaatgatgtctttctatatttcccacttctgatgagacaatttaaagtgtattataaacttagtcacttttaaatacattttaaagatcatattatttattttcattccagtcattgccccatccagtccccttcccacagttcctcatcccattcctcttcccccttgcctccaagagggtgcttctcaatcccccacggggtctaccccttccctggggcctcgagtgtcttgagaattcattttttttttcccagaggcaagactaggcagaactctgctacatatgtgccagggtccttagaccagcctatctatgctcctggttggagttccccggggtctgggttagttcagactgctggtcttcctatgaggtctctctccccttcagcttcttcaatccttcccctaattcaaccacaatggcccctgacttcagtccaatggttgggtataagtatctgtttctgtctcagtcaacttctggtagggcctcccagaggatagccatgccaggctcctgtctgtaagcacatcatagcatcagtaatagtgtcaggccttggagccccttgcacccccaggagagaaatcccaagttgagccagtcatttggctgcccttccttcactctcttttccatttttgtccctgtagttcttttagacaggaacaattcagggtcagaaattttgactgtgggttagtcaccctgtttctctaattgagtccctgtctatcttctggaggtagatactttgagttccctttctccaatgttgtgcattttgactaaggtcactcccaatgagtcctgaaagtgtctcacctcctgggtctctggtactttctatagggtcttcccacctcctactctcctgggctgcttgtttctattcattcacttggccttctggacttctctcctgtccccttctcccatacctgattctgtacccattttcccctccccctcttatccaagtccatcctttcctctccccttttaagtgggattggagcttcctcacttgggcctttctgattattacactagttaaggtctgtaggttgtaacttaggtattctgtactttttggctaatatccacttattagtgagtctatactgtgcatgtccttttgggtctgagatacctcactcaggatgatattatccagttccatccatttgcctgtaaaactcaagatgtcctccttcttaagagctgaatagtattccactgtgtactttttctgtatccattcttccattgtgggacatatgagttgtttccagcttcggcctatcatagataaagctgctatgaacatagtagagcacatatcactggccatctgattatctctggtgctaactggcctgggtgtctctgactggaactggcttccttggaggtaggtatagctgtgtgacctgagttagagctggtctctttagaggcaggcagtgttgtctctggttagtttgggcgtcttatctctctggttagagcaggcctcctatgtccctgattactagagacctcctaggaggatcataggctgtagcatttgggagggtattgggccagtgatctggtgcagctggggaagtgggacaaaagggaggtggagctgggggaggggataagttctgcatcagctggactttatgggtgtcccagctgatgtgggtatttgagcaaaattctcacctgtgtccttgttcactgtgaacctcctaggaagcatgcaggctgcaatgtttgggcaggtttcttccagggctgctgctgatctggccaaggtgggactacaatatatttttattacctgaaacacccagttttacagaagatcacttgtatgtattcttcctgtctaactgaagttgtgtgtcctttgatgaacatctttccaatacatttccctatctggagcagatactggtaaccatcattgtttctttgtttatatgaatcagatttgctaagattcctaatacatgtgaaatcatatcatttttatcattctatttctgggtattttgcctaacagtgcctgcttatccctgttgcaaacgatggctttcattactctgttggactggaatggtccattatgtatatcctccacattctttgttcatttatccactaataaacacttagtttgattcaatttattgcttactatgaatggtgtaacaaattttatttatggacacacagatttgaattttgtataattttcacaatacatacatacacacacacacacacacacattgaaaatgtcaaaaaatattgttagtatgctctattgtcagtagtttcagtttattgcagagttaggagtctagataagtctttgtcactcatatgtgattctgacctagcagcacaggtgtgaatctatggccattttgagaattatttatttatttatttatttttaattttccttataaatttttcaatttatttcatgtgtatgagtgtatatatgcatactacatgcatatttgatgccagaggaggtcataggagggcaccagataacctgaaactggagatatggatatttgctatctactatgtgggtgctataaaccaaacccaggtcctctgcaagagcaactgtgcttttcactgctgagtcatctctccagcctaagggatttgattttgagtcctacctctgctcctgctgagtcagaatatttattctgcaagatgtccacatggcatttgaaaattatttaccaaccctaggctgtgccatcccctccttacccatcttcctgcttttatcagtgacttagagcaggctagagaatttgtaaggagggtgtccatggtataggacctggcctagttgttctggatttcttaaagacaaaacagtatgttctgaagtcccaaaaaatgcaagtaggacgttgatattctgctactaaaatgagaaagttatctcatattttaatgcacatatnnnnnnnnnnnnnnnnnnnnagtagagcacatatcactggccatctgattatctctggtgctaactggcctgggtgtctctgactggaactggctttcttggaggtaggtatagctgtgtgacctgagttagagctggtctctttagaggcaggcagtgttgtctctggttagtttgggcctcttatctctctggttagagcaggcctcctatgtccctgattactagagacctcctaggaggctcataggctgtagcatttgggagggtattgggccagtgatctggcacagctggggaagtgggacaaaagggaggtggagctgggggaggggataagttctgcatcagctggactttatgggtgtcccagctgatatgggtatttgagcaaaattctcacctgtgtccttgttcactgtgaacctcctaggaagcatgcaggctgcaatgtttgggcaggtttcttccagggctgctgctgatctggccaaggtgggactacagtatatttttattacctgaaacacccagttttacagaagatcacttgtatatattcttcctgtctaactgaagttgtgtgccctttgatgaacatctttccaatacatttccctatctggagcagatactggtaaccatcattgtttctttgtttatatgaatcagatttgctaagattcctaatacatgtgaaatcatgtcatttttatcattctatttctgggtatttcgcctaacagcacctgcttatccctgttgcaaatgatggatttcattactctgttggactggaatggtccattatgtatatcctccacattctttgttcatttatccactaataaacacttagtttgattcaatttcttgcttactatgaatggtgtaacaaattttatttatggacacacagatttgaattttgtataattttcacaatacacacacacacacacacacacatattgaaaatgtcgaaaaatactgttagtatgctctattgtcagtagtttcagtttattgcagagttaggagtctagataagtctttgtcactcgtatatgattctgacctagcagcacaggtgtgaatctatggccattaatgagaattatttatttatttatttaaaaatttccttataaatttttcaatttatttcatgtgtatgagtgtatatatgcatactacatgcatatttgatgccagaggaggtcataggagggcaccagataacctgaaactggagatatggatatttgctatctactatgtgggtgctataaaccaaacccaggtcctctgcaagagtaactgtgcttttcactgctgagtcatctctccagcctaagggatttgattttgagtcctacctctgctcctgctgagtcagaatatttattctgcaagatgtccacatggcatttgaaaattatttaccaaccctaggctgtgccatcccctccttacccaccttcctgnnnnnnnnnnnnnnnnnnnntttatttcatgtgtatgagtgtatatatgcatactacatgcatatttgatgccagaggaggtcataggagggcaccagataacctgaaactggagatatggatatttgctatctactatgtgggtgctataaaccaaacccaggtcctctgcaagagcaactgtgcttttcactgctgagtcatctctccagcctaagggatttgattttgagtcctacctctgctcctgctgagtcagaatatttattctgcaagatgtccacatggcatttgaaaattatttaccaaccctaggctgtgccatcccctccttacccaccttcctgcttttatcagtgacttagagcaggctagagaatttgtaaggagggtgtccatggtataggatctggcctagttgttctggatttcttaaagacaaaacagtatgttctgaagtcccaaaaaatgcaagtaggacgttgacattctgctactaaaatgagaaagttatctcatattttaatgcacatatctttttagtacagacatatcacacatcttataggcagagccaggtttgaagaaacacttcatctgttcaatagcctttacaagaattgtgaaactacagagagttaatggaaagaccctgtaagagatcattttattattgctctgtgagaggaaagcatagcagtgtgtattaaacacctgagaagtagagcaaaccctcatcatgagactgttattgaaaaaacaccgtggaatcatgaaaacagagagagaacggtttaagaaattatactttcttctaatactcatttcagccatattgacaaaaagagggacataaagtgccatatttcaatgccaacatgtgagtgtcagataactttttgagacttggtgtattaatctgtaaaatgatgatgtttttggaacattttttaaacagaatttttttaaacattaaaaacgtgggaatttgctttgcagagtactaatcttcagaggtaaattaacccatgattattttatgttcataaatgctgcccagagcttgtgctcacagtccacctttaggaccatctgaaatggtcctcaacatgaatggaaccatttgttctgtaaggaacaaatgtttttcttgtagctttggttattacacttcagtggatttactttccatttgattctggtaacagtaagattaataatggggtttcagcaagactaaaatgtgaattctcctgggattggagaaaaaccacatgcatacaaatgtatttaacactgatctccacattatttattttggctaattctgtaaactcatgtgtagatatgtattcaagcacctgttcaagagagtattatgtagtgacttaatttactcttcatttttattactttattctaccacttttagaaaatgtaaaccaccatttctttcttttattactggacaaagacaatatggataattggcttaagtgcttgcctttatataaccagaaagaaacaaattcccaacttctacattcccttttaacaaatatgatgttatagaaatttaaaactaatgttaaaattatacagttgacagatctcatctctaggaacattgagtgcaaagctcacaatagattatcaaaatgtaggtagactggttctttccagtggtagcctctactagactactgtagtatgtacactatgtgttagctaatgacaatgtccttttctttgaaagacttttttcctgtgggtgggaactttaattctaattgtctttatatttagaaagtcttccagccacaatttacagacaaaatcccatccatccctaaaagtttggctcgaacaattatttattcacatattcttcctgatcttgccaagtggatgtgatatttatctcctctgagtccccaaagcactgtgtatatacctctctaatggcacttagctcattttgccttatgtttttgttatttgtgaccttgacatttttcctcctagacagctgtagagcaggactgtgttttttttattcttgaaactgttggaagacaattctcttacttcctctagaagacttttctcagagagagactaaaaacaaattggtcagtaaagttctatattttagtttccagataataaaaatcaaggacaattatatttaatgagaaaattttacatataagtaggattctatgttaagcacatgcctgaagatgcatgtttagatcataaagaaatttctgggttaacgaggaggagaaaagagaatgttggaaatcttgtattcttggggatgggatgatttgtatgctaagttgggcaatgcaactgctactgttgatggcccatttgatatttattttattcaccccatagagtagtcatgttgccatgatagtctctgtactcatgggcagcttcccacttcacataattttgtcttgtaggtttttctcccataaagggctgttcagaaatagtatagattccatgttttaatgagtaatcaatggggtacaaaaatcagctattaaatattctgccttctgtgtttgctaggccccggcatagtctcacaagagacagctacatctgggtccttttgataaaatcttgctagtgtatgcaatggtgtcagcatttggaagctgattatggggtggatccctggatatggcagtctctacatggtccatcctttcgtctcagctccaaactttgtctctgtaactccttccatgggtgttttgttcccaattctaaggaggggcatagtgtccacacttcagtctttattcttcttgagtttcatgtgtttagcaaattgtatcttatatcttgggtatcctaggttttgggctaatatccacttatcagtgagtacatattgtgtgagttcctttgtgaatgtgttacctcactcaggatgatgccctccaggtccatccatttggctaggaatttcataaattcattctttttaatagctgagtagtactccattgtgtaaatgtaccacattttctgtatccattcctctgttgaggggcatctgggttctttccagcttctggctattataaataaggctgctatgaacatagtggagcatgtgtccttcttaccggttgggacatcttctggatatatgcccaggagaggtattgctggatcctctggtagtattatgtccaattttctgaggaaccgccagactgatttccagagtggttgtacaagcctgcaatcccaccaacaatggatggatcacagggctcccaatggaggagctagagaaagtacccaaggagctaaagggatctgcaaccctataggtggaacaacattatgaactaaccagtaccccggagctcttgactctagctgcatatgtatcaaagatggcctagtcggccatcactggaaagagaggcccattggacacgcaaactgtatatgccccagtacagaggggaacgccagggccaaaaaaaaaaaaaaaaaaatgggaatgagtgggcagggaagtgggggggagggtatgggggacttttgggatagcattggaaatgtaattgaggaaaatatgtaatattaaaaaataaattaaaaaaaaagaaaaaaataaatattctgccttatctggacacgtctgaggtttgtttcagaatgtcattgcgaaagatgaacaagagttaactgcagcagtaacattatggtcaacacattccccagtgcactttctcgtttcctatcttttacaaaaatatacccccaaatcgtatctccagctaacttaatgaataggatcttcttttgggtctagtgattctcagtcatcctgaaaaaattagagatgaagtcatagcaacaagtaaatttcttcgagtatatggtttgctttaaatgatattataatgaaaacttctataaatgaaaaaagttgtgacagtggaggaaatatttggtttaattagcttctttttagagtagaagtttttgaagagtctttgaccactctgtgcaatgagtgaagaatgaaatgataaaggggtggatgctcttgtgagtagatgaatatgattgtgttacatccccctgtctgaaaatctgagtgcactaatgctttttatattttcagactgctttggtaaaattgtataaataaagcaaacataatatatgtttacttttgacttctagaccaatgccattacagcaagagcagtgaatccagaagtagaataatacacagaactacatttttactcagaataatggggaaacttttaaataactgactggttgtgattcagtagtcagggatttaaaaactcacagtattacacttgtctgtcaaatgtgcagttgcttattatgttcatctatattttgtgatagctatcctagatagatttatatccaaagaaagggaaaagtagacaaaacaaaaacaccaaaacaaaaacacccagaagactaagttttgaggagaaaaaaggtaaaaaaaaaataagtgcaaggaaggggttgcagatgatatgatagtatatttaagtgaccccaaaaatgccaccagagaactcctaaacctgataaacaacttcagcaaagtagctggatataaaattatctcaaacaaatcagtggcctttctctacacaaaggataaacaggctgtgaaagaaattagggaaacaagactttttacaatagttacaaataatataaaattctttgatgtgactctaacaaagcaagtaaaagatctataggaaaagaacttcaagtctctgaagaaagaaatcgagggaaggggttagaatttataagtgccgagtaacaaaatctcatccacactggaccaggccacctcttatgtcaaaaacctaaaaggcccaggaagggagctgtttacaaagcttgactcagagctccatcttaacagagccatttttctggcagggatctgaattgaggaggttttgttctcaggctcaggatagtgatgaaagaaatgtgaaaggcacattagcacccaaacagatagtacagaagagaagaatatttatgccaacgcagagggtttctcacccaccctctttgttgtatgtacttatctctagaggtcagaataatgaaattagagcatcaatttattttacttttcaaactgtataaaatcaattcccttttcttgccttattgcattagctgaatataaagggctggaaaaggcttttttgctttactgctgatattaaaaaggaatgacagtgtttcactggaaagcttatagatttttcatagatttgttttctgtcacattgaagtagtccactttatttatttatttaattgcagtaagttctgagaattcaacctagagccttgaacatgtcagtcaagtactatatataaccaccgagacacaaatgaagccctaagttatgtagctcaggctactcctggtatgtcaacctttctgagtactaggattacaagtgtatattaccatgcttggcgctcagatttctttatatcatgacttggttagaactgtaactttgctgttgtgatatctttctatgttaccgccttcatggctaattgccagttcaattctcagtaccctttgatcctcatcccaccccaacccactctccaaagactggctatgctgcggcctagaggatgggtaaggatgtaggttgtaggaggaaagagcttcttggcgatgcgcttgggtaagtttgaaccagattggattgatagtaaaagtattcactaaagagcagcccaactctcccctttgacgtcaattctctccctttgacgtctccactttgatgtttttcactttgtgtcctttatcttagttcaggtttccattttacagtttgctcaggcttctttcggatagcacccaggactactaaccagggatgacacaaccctcccacatcaaccattaatcagcacagtatctcacagacttgtcttcagaccaaacttatggagatatttttcctattaagtctcccttatgaaatagactataatgttataaagagatacaagcaaaactagaataggaggattaaatgaagaggaagatgggagagcagagtgatagaggtattacagggagggataattaacacaaattcttttaaaatccatatgtagtgtggacactctctgaaaaaaatatatatgaaaaagaacttaaatggagtaatatgtagtgagggacacaatgacatgtgtgtgtttgtgtgtgtatgtgtatgtaataacaattaaaattaaaagagtccatggatttgagagagatggggtagagtatgggatggattggagggaacaaagggaatgaagatcatattttaatttaaaaatagaagaattaggaagaagatacctagtttaattttattgtaatgacaatcaaaaatagaatggtctgtattatattagttgacaatagagatagacttaaactgactagacaaggactctggtccctgtgtgctctgtgatcccagggagtgggaatcctgaatactaaacaccagacaagaagacaaggaagccaaatagaatagaggctactgatttattaacttacttaggatactcctgggttcaagcagagaacgatcaattaaactgaggagttctggaaaggtgggttaaggactaattattttctgggcttggactttcaatcttgccatctgggaattgcccattcaattaatctaaggaatgattaagccttagggaaaatagactcacaatgaccaggttctgattttagctggaaactagtttaataacttaaaataggaaatccctcttcctagacgggaagtttacataagatcagaaataacaagaactataaatcaagaccagaaaccaacttgttgagtatatagaatttgaagagaaagggaaccctgaggaaaaacctatcccaactgtttgggtagccatgtcctgctaatgcttctatcccttaacaacaattttgattctttttatcaagagtccttcaaaatgcttcaaattctgattttaaagattttccttcctctttccctctcccctcccttcctttcctccctccccctctgcctgcctacctgcctccttccttcccttcctccctccttccttccctccctccctccttccttccctccctcctttccttccttctccttctccctcttctccccaattattgcaaattctttcatggaatgcatattcagtgagcacttgtataagtaatagttattaatatgtgtgcatgttgaatactgatctcaatgctttatatgctatttcctttacccccttgttcactctatggaatagatatgtccccctttcagtagagaaaccatgcagggtttaaatatcatgctaggtcacaaatttatggagggtgggtgtagattccaggttcacaaacatttgatgattttgctgtctcatctgttttcatttttaagaggtgaatagaggaggttgtgggactttgtgtatgcatggcaggggatgcatgatctttctgccatcctgtggcctggatatctattgttttagttacgaaggtggtctgccatggcagtaaaatggagactaagatggagtaacaaccctaaaacactatgccagatgagagacagcagagcatgtcatgctcttcagaggttcacttatgtctgcttgtcttcctgttcctttttagaaatccacttggaaaaatatttcacttttgacttgaatgtgttgagataagaatccatatataaatttcagtgagactacactagaagttttattagtaaaacccttctccatctggttctttttttcctccctcctttttcccttccttccttccttccttccttccttcnnnnnnnnnnnnnnnnnnnnatggtgtacactggctttatacatgtaagtgggctgcacacatccatccattcaacttagaaccagggagtccactgtataccaagggtcatgccaggaccagagacccagggatgagcaaacaaggaagaggatttgcccgtaagagacatacttaggttttgagtaacgagacaagcagtggacaaggctaagtggtgataagagatataggtgaacaccaggcagatgcagagtgtcaagcctacctccgtccctccctccctccctccctccctccttccttccttccttccttcctacatccagagggcctctctcattgctttatcctgattgtgttggatctaccttctttgggctgggaggaaattcagtcagtctctaagtttaagtcctggactctctcgagcaatcatcaccacttttggttatgtgtgggcttagtgctgaggactgttgtcttctgtggatttcggtgagcataacagaggcatttactttatgtacttattttattttctggtagagtagatgcagctcggatgtgaggatgtgactgtgagcacaggagcagcctgctattaacacctgccctgcttattgcataggggctgtcaccttgctctttgagctttatgtatttatttttttagcttattttttattagttattttcttcatttacatttccaatgctatcccaaaagtttcccataccctcccccccactcccctacccacccactcccacttctgggccctggcattcccctgtactgaggcatataaagtttgtcattgatgtttttttcacttaggatttggaggtctaaaaactatatgttaagcacaatgatttcctttctgctgtaatcttctataattttcttatgttttatacaaaagtacatatacttttgatgtagttttgacactctggccctttgaatggaggaaagaaggaaggaaggaagggagggagggaggaaagaaggaaaggaggaagaaggtactggaagagggagggaggaagaaaaacaaaacaaagacttgtcatgccagctgggcgtggtggcgcacacctttaatcccggcactcgggaggcagaggtaggagatttctgagatcaaggccagcctggtctacaaagtgagttccaggacagccagggctatacagagaaacaaattctgtcccaaaaaacaaacaaacaaacaaacaaacaaaaacaaaacaaaataaaacaaaaaccaacaaaaagaagacttgtcatgccatatgaagccgagcaccacacaactcaagagcttacaactgattttatcttactaaaaacagtactgccattttcatgaacactaaactctgctagtggtactgtaattctgaagggacaagaggataagatttcttttattctctctctctctctctccttccctctcgctttctttatatatttataattgtatatatataataatatataacatataatatatttaataattatatatattattggatattttatgtatttacatttcaaatgttatcccctttcccggtttcccctcaagattcccccctctcccacaccccctcccctccccctgcttcttctatgaatatcctccccctccgatacacccactcccacctcaccgccctgacattctcctacactggggagtcaagccttcacaggaccaagggcctcccctccattgatgcctgacaaggccatcctctgctacatatgcatctggagccatagatccctccatgtatactctttggttggtcgtttagtccctcggagctctgggaggtctggttggttgatattgtttttcctatggggttgcaaactccttcagctctttcagtcctttctcttaactcctccattggagaccccatgctaagtccactggctggttgtaagcatctgcctctgtatttgtcaggttctggaagagcctctctagaaacagctataacaggctcctgtcagcaagcacttcctgacatctgtagtagtgtctaggtttggtggctgtatatgggatggatccccaggtggggcagtctctgggtggcctttccttcagtctctgctccacactttgtccctgtatttcctttaaacaggagcccttctgggttaagaatttggagatgagtgggtgaccccatcctccaacaggcagctttgtctaacctctggatatggtctcttcaggttctcccttccctttgttgggcatttcagctaatctcatcctttgggtcctgtgagcgtcttgctttcctggcttctgggacttgctggtggctacccccagttccccattctccattgctacatacttgtgttcaaatttcttaccctctgcatatcatacccgtctcctctcatacctgatcctgctcacctttttacccctccccctcctctctttctcccaagtcccttccatcctttacctccattgagtattttgttcccccttctaagatggactgaaatagccacatttaagtcttccttcttcttgagcttcatatggtctatactaactaagggaaaccaatggtgttttttcagctgtcaatgtgttgagaaaagttgcaacatatgtaaaactggaggagccattttaacatccaggaagaatatttgcatagaccaaacaaactactgtaacctgcagacaggacagagtacgcaacattttacatttctgcctgagataatggaggcatctgctctgctttgatgtgtttcattctcatgctttgaaacttttccttatttcttcataggagagtgggactgctgacacagttgaatgtgtttcttttctttctttctttcttttttttttttttccgttacttggcaaagagattgagtttccaacatggcccctttcatctctctgaagattgcttttgcaagcagtgtctgctcctgaggattcattccttttgactggcttgctgaccaaggaaagtacttaaccttgatagcatcatggattgcttttcaggccacttctttctttgcttttgtggatttgattttccaggtttaagcatcatttgacaaggaaggaaggacagggtctgttcatggaactgtagtggcttttgtcaggcatggaaggcaaagagccctcgaagaggtctttcagatatgtgagcactgtcccgcacagtggaagggtctctatctggtcttctggctgctttagtttcctgtgagtggagtaagttttcagtttccctctggaagaaatgaagaattggagatgatgagctctctgataaggttatttcttcatggttctgagaaggaaatcactgttggcctgattatgttggtcttatgctggctcttgacatccactctaggagtccgtatgcaggtgagaactaacctagagtcattctttatctctttcccacctggaaaggatattccttcaaagtagtctctagttgcagttctgtttcttctgtcttgcacatggaggaaatattgctggacatttgaccagagaaactatttgctgagggaaaaacatgcttttaagggcaccagagactctttagtaggatcacatgctctgccaggtcctcagtgctgataacgacaaacgcttcagcagttatgggagtgagtgcccttcatcataaatctcatattttcctggaattacccagccttagcttgaacatgaagggaagactctctagtgagctgggtgggtgcatagggttcaatttcaatttttaggccttttttttttcacctaccatgcgcatgtagtcttctttaccttcctaagagctccatggaaatatgcaatgggagtctcctatcagagcccccagaacagtggaactaacatagttggttcttctccaaggtattttgatacggccaagataccagcttcccatgggctgaaagaagcaaaagtcttagttgttcacagtgagcttggcttcagggtgacaaacttggtgttccactctgctctaaagtcacaggatacttaggtgatataagagatggcttacatgaatatggaaatcagtttatcactttttgtaacaagtatcatctgtaagtatgtcttttcctattaccattaagttaacatgtttcctgccttatagttgaatatgtaatgttttaatttttacaagaagcatattttcctgcttaatgtatcagtgttacttaatataggacatactttagaaaattaacgtttttaagaaccaggaaatgtcctttttaatttgtgaactcctgtaattgtgctgccacagcagattttaattatgatgccattaggaaggtaaagtggtttatttaggctaactagagagctaacctgattagagtttgtgcaatcatgagctaatttatcctaatctcttttattcagaaacttctaatttagttataaaaatatagctgggggatcaggatgccaaaaacctgccctagggtggtttcattctttcaaaagttgtaaaagcataaatatgaactcaagttatactagctttagatgcttcttcacattcagttgctgctgagagaattgttcgaattggaaatagaaacagatctttctgttcttttgtgctgagttttatatggtgcatatagagagaaatggttcatcatgtaaaacaaatgtagaaacaatgtccacattgcgaaatgaaaggtacatagaacaaagaaaaaaaatcaaatctttaaggccttgaaaaagactgtaaccaaaaatatgaatgaaaatgagaaatgaactgcacacaaaatgtttgcaacttattgttataaaaaagtttgctgttgaagtcttttgttgagttcagacaattattttttcttatggagtaaacatgtagttaacagagttatgtgatgtctccagtgttggctgaaatggtatctaaagaataagaataatcccagattctttctattaagataacaaaaatttaaaagaataaaagcatattgtatgaaattaagtaaacattcaatttatcacacttaagttgatgaaaatagaaagttctgggtacattcaaatacactacagcattattaatggtcaagttaaaagtgggctagtttaagtcttaagaagatagaaatcttaaaacttcatagcctaagactataccctctcaacaaaaaaagaaacacgttgtaggtgttgggtagtcagtattccagaacatataacactgggatacaaggcctaaggtcctcttgaatttttcttggtttttccaaagtattttggcagatttgggcttttaaggttatgtatgtatgtatgtatgtatacatgtatttatgtatttatgtgtatgtatttaaagagattggttaggagtaccacatacctcctccacctcaaatttatttcttattgcacagagaagaattggtgccatagactagaaattgttttattttgtatttctcttatactattgtaacttaaaagagagtacactccctgaaattggagttgtccaatccattcccttgtgatatcttcagttctgttttacacagtagggcttgtgattttgatgtcagtgaccttttctaggtcacatggatccatgtgcctttctatactttcagtgttaattatgagaaatgagccataaagaaaatatttttctaaaagatgatattcctagtgtacttcttagacttgaaaacatttttttattgtacttatcttactttgtaaatatcagtgccaggcactcacgcttggtaatgtctaatgtgagtacaagcatattctacttagcatgtatattgtagctactttgatttttacggtgacgattcaaataagtacactttatatttttgtataagctctataaataatttacactcttaacttataaccaattattcatatttccttttattttaacttattcaactttaattattcaaagatagccccacaaggttttggcttctatattttgttccattgtttcttattgctttagtgcatcaatcatcatcatcatcatcatcatcatcatcatcatcatcatcctatcaccaccaccaccatcatcattttagtttatacacagttgagtcttttaagctctagcattcttttaccgaacctttcttctccagcccctaactccacaactgcctcttatagggaattgttatattgcctaggccagtcttgaatttataatcctgccacattcttctaagagctggaattgcaggaaggtgctaccacaggtatcttcttgggctagagatagcttagcggttaagagcgagtaatgctctgacagaggatctgagtataggcttttgcagtaggatctgatgattttttgaatttcctccttttctgttattatgtctccgttttcatttctgattttgctaatttggatactgtctctgtgcttctggttagtcttgatgattttctcaaagaaccagctcctggttgtgttgatcctttgcatagttctttttgtttccacttggttgattttggccctgagtttgattatttcctgctttctacccctcttggtgcattcgcttctttttgttctagagcgttcaggtgtgctgtcaagctgctagtgtaagctctctctaatatttttttctggaggtattttatgccttcatttgcattaaattctaaaacatcaatttcttccttgatcaagttatcattgagtagagcactgttcacttccatatgtatgtgggcttcctgttatttttgttgttattgaagaccagccttagtacctggtgatctgataggctgcatgggattatttcaatttccttgtatctgttgaggcctgttttgtgactaattatatggtaatttttggagaaggtaccataaggtgttgagaagaaggtatattcttttgttttaggataaaatgttctatagctatctgttaaatccatttggtccataacttctgttagtttcacttcatgtctgtttagtttctgtttccatgatctgttcattgctgagagtggggtgtttaagtctcccactattattgtgtgtggtgcaaagtatgctttgagctttagtaaagtttcttttatgaatgtgggtgcccttgcatttggagcatagatgttcggaattgagagttcctcttggtaggtttttcctttgataactatgaagtgtccttccttatcttttttttttttttttttggataacttttgattgaaagtcaattttattctatattagaagggtcactccagcttgtttctttggatcaactgcttggaaattttttcctagctctttactctgagggtagtgtctgtctaagtcactgagatgcatttcctataagtagcaaaatgctgggtccttttcacatattcagtctgttagtctatgtcttattggggaattgggtccatggatattaagagatattaaggaaaagtgattgttacttcctgttatttttattgttagaggtagaattatgtttgtgtggctatcttcttttaggtttgttgaaagaagattactttcttgctttttctagggtgtagtttccctccttggggtggagttttccatctattatcctttgtagggatgaatttgtggaaagatattgtgtaaatttggttttgtcatgaaatatcttgttttcttcatctatggtaattgggaattatgctggatatagtagcctgggctggcatttgtgttctcttaaggtctgtatgacatctgcccacgatcttctagctttcatagtctttgttgagaagtgtggtgtaatttgataggtctgcctgtatatgttacttgacatttccccttagtatttttaatattctttctttgttttgtgcatttggtgttttgactattatgtgatgggaggaagttcttttcgggtccagtctatttggagttctgtaggcttcttctatgttcatgggcatccctttctttagttagggaagttttcttttatacttttgttgaaaatatttatttactggccctttcattggaaatcttcactcttttctatacctattattcttaggtttatccattgtgccctggatttcctggatgtttgggttaggagctttttgcattttacattttctttgaccgttgtttcaatgtttgctatggtatcttcagcacctgagattctctcttctatctcttgtattctgttggtgatgcttgcatctatgactcctgatctctttcgtaggttttctatctctagggttgtctccctttgtgatttctttattgtttctatttccatttttagatcttgtgtgatttggttcaattccttcacctgtttggttatgttttcctataattctttaagggatttttgtgttttctctttaagggttttttacttggttatctgtgttctgtcagttctggggtgcagatggaaaccggaaggatcctgtccccggctgtttcttggttcctgtttcctgatggctctgggaaggtccctcttgggtcaggaatttgagcagaagtggtggtttcatctgtgctcctaggtgtgtcagcactcctcggagaccagctctttcccagagggatttgggtatggagaattgtggcacaaggtcagctctaggcccaggttggctcttccattcttaaagtctcctccttcataatatccctgaggcatagaaggcatcatagaatatagtctcatttggggtatagtatttgacttatgtcaagacatagagtggttctgtattcatcacccttcatagcaaagagaagctttagtgcttaatacagagaatagcctttgctgtaattacaaaaataaatatagagcaggtagtttggaacatattagtttagttacacagtaattttaagttccccctttgggcctaattccccgttagtcatgtgattttgactgggtttccattcctgacatgaattttatggaatgggcctcacatttaatcagagaccagtcggttaactctataacagctatgttacagctataagcacatcttgtctggcaggttgacatggctattctagggtccacagctggttaggactgttgatgtctttcccccctcagcagcctgcacagaactttctcctactatgaaagccagtagggaggaagctttagctcaattccaaattcatttctctatatccatctgtgaaggtatgtaatgccttcaaaagtggggtcttttcctttttttctgtcagggaaccatgaggaaagctagagtctgattcagtttgggagtgtcaggtacttcctggaccaacaactcataaggagatatcccctacctggcactgacctttttgcttaattatccctaagttttaaaaacaacagtattcaacaatgtaggacacttgccttctaattctttaaaacatatatcatttaattggattacaaagtacacttccatatgagattttcttgcaatctatattttggttaattctctcccatccatctttttctctccattacccccactttgctccatgcacgaataatttcccctatagtacactcctatttctttgccttttactcgttgctttttactaccttttactatcttctcccaatgtcgtgggtttttttttttttttttgtgtgtggtttccttacttccacaggtgttccaagttaaagtcacaaaactaacagaatgaggctaggatccacatgtgagagaatatgaggcatttgtcttttttggcctggatacgtcacacagtataattttttccagtttcatacaaattacatattgcaagtaacttgaaaataaattttatttttccttatagttatttaaaattccattgcatatatgtgccacattttcattatcccttcttcagttgatgggcatttggctgatcccattttctagctattgtgaataaagctgtaattaactaccatgtagtaggatatagactcctttaggtacatgtccttgagggagtattcttcagtatccacgagtcatgtgttttatgtaccttacataattttatgttacctttcctctgttgttagaataagtgcaagaaaatgagcatatagaattcatgaaagtattcttgtcctaatgaaaagctagatgattgttccatcccatgtgtttcatgatgaatgagtaatttaggccaactttcctttaaaaatttggagagaggtgaaggctcaatgccccagtgtaggagaattctagggtggtgagccgagagtgggagggtgggtgggtgagcaccctcatagaagcagggggaggagggatgaaggatgagataggggatttgaggacggggaaaccgggaaaggggtaacatttgaaatgtaaataaataaaataaccaataaaaaattgcaaaaaaaaagagaagcattaggaaaaaattgcagaatgaagtttccgtatttttgaaaagtaatcatcaagttttccttagatttaattaatttcaccctatattaggtaaagtttttggttaacagatttgtaattttatttagctcattccttttatttaatgtaccaagtctctgattaatctaaaagaatatagacaggctaaatatcacctctcacttcttactaatctgttgccataggtaatgggccatgtactgtgaaaaatctgaagaagctatgttattgattatattggccataaaagaggcagggcttttttttttttcttcttcctgccttttgattgaagccatccattaatgttcatttgtctttccggtgtagggtcatagagataacaaatgtgtagcttcttcttcttaggtagaagtacagggtaccaggaaggttgcatacgccaaagtttcttttgtggttttcccaccccacaaattgtgtcactcatgccaggataatggttatcccagcagaagccatgcccccattcttggcttacttacatttgatttagacacagacaatttaattttaatcaatacatctacttaacttcttagtaagacaattgggagataaacttaagttcatattggccaaagtgcatttttaaagcgtttcctattcctgacactgagtacatatcatacaactagctgatttccactcttaatctttgtaagataaggtgaactgctgtaataacagccactacagtcatacccagtggaagtctctcaagtaattcagatgttttatcttatttgtttagattttttctctaacattatttgtagacattatttccagcaagtatattttataggttttgttttgtttttgtttcgagacagggtttctctgtgtaacactggctgtcctggaactcactttgtagaccaggctggcctcgaactcagaaatccacctgcctctgcctcccaagtgctgggatttaaaggcatgtgccaccactgcccggctgtatattttatagttttattctttggaggagtggcacacttatcttcatgctctgttccttttcatttttctctgggcacgtttttgtatttcacatgacactatattttctgcaacacagtctgaactacacagactttagtactgttttagattttagtgaggtgtttgctccttattctttcttttaatgaaattgttaatttttttctttagcttacttttgagttttcattgtagagattttagagtgtttaactaataggcaagcataaaagaatatttcctaaaattcacttgtttttctgctatgtgctctctacacattgaatttatattcttttgtaggtcataatgtcttcatgaatattattttatctttttatgtttgttcattcttaggtaataaagagttctaacttagtatttatctcataaaaatatacaacattgttaggttccttttgagttttgttagcattctcctgtatgacatacgagtagttccttaagatttaaaattgaataactaggcaacatacatttatattagtgactcgttaatttggaagaagttatagacacagcaagccatgcagagggagctcccctcagcttggtttactgtctgtctgtagggaagccgctgtcctgcactccagctttccatagccggtttctttttcttatagtttcccatcaagaatatcgcttgtctatgtctggcctccttcctggggcttctcccagctgtttcaggcttcccctctgcttcatttccgaaagtcaaatttctaactcacttcatccaccagaacaaacaccagatgtattaaagatttacatatttaaaaacttcataggttcttaaatatggaaaatcacttatatactatttggagaaggatgtactttaaattcaaagcagaagtaattgaagtagatagatttagctatttaagatattacattgtctgtgcaggagagaactcattttgtgtggactgtgttttctctagaagtgtcttacgtttaggcctttgatacattttgaatctattttgttcagggtgagaaataatgatctagtttgattcttgtatagccataaaaccatagccctcgcaccatttattgaagaagtgttattttaccccaatgtatgttttctgaccctttgttgaaaatatcatgtgttctgttaactttcaaacaattatcttgggaagagaaaaattcccaactgtgaaattaccttctttagattagtcagtagacatacctgtgtggatattttctcattacttcttgatattgggtgacctgacccattgtgggaagttctcttcctagtcaggtgggcctgaactgtattgaaaaagtatctgagaaagtaagtaattaagcggcatgtctctagtctctgtttcggttcctattccacattactgtcttgagtttctgccatggcaggaaccaaataaatcctttcttcttccaattatattggttacaaaatttttaccacaagagaaccagaagtaggaccattggttactgtgtgtttatttcttgtttctctgtatttcactggtctacatctgatttgtatttgtggtattccattcttatagaatcaaaagcagaaacagaaaacagcagaccatggttctgtagtacagtttgcaattaaacatgggaaggcctctttgttaagtgttctccttaggattgttttggctagttgtgatctttagtgattcaatatgaaatttaggtaagtggttttttttttcctttttcctttgttttttctttttgttattttgtttatttttgtttgtttctactttgtagcatgttgttggaattttggtaagggttccatcatattgtagattttggaatattgccatttgtatgagactgattttgccaatccatgagcatgggaggtattatattgtcaagagtcatctttactttctttggttcttaaagttttcttgtaggcatattttacttctctatgtagatttatttctagatattcttatagacatattttacttctctatgtagatttatttgtagatattttatttttttaaaaaactgctataaatgggattttatacacgattttttttagcaagttcatgattattacattaaggctattgatttttatatgtagaagttgtatccaactaatactcttctgaaagtatttattaattctaaagtactcctagcatagtcattagagtcatatcacctgcaaataagtgtactggagcttctttctttcctgcttaacccacctccctgtcttctatgctttgctctagcagactttagtgctacctatatgaagtgatatgagagttggtgcccttacttcattttatggtcatgttttcagttttgttcccattaggtagagtgttggctgtagtgtttcatatttagccctccccctctatatatatgccttttatgtgtttgttgaaatgctcatgtgaattctgtcctcaagtctatatgtactgaactacatttattgatttcatatatgttgaaccaaatttgcctccctgggctgtaatcatcttgatcaggtatggtgtatattcttagtgtattatatattataatatatcatgcatgtgtattatataatatataaacaaataataatatatcttattatatatcttaatgtatcttattatataatatataattatatataattatataatttgagacaggatctcacactttagctttggctcactaggaactcactatgtagaccaggatgacccaaaccatcatcgaaatcagcctcttaatgtgttcttgaatttgattttgcaagaattttattgaaaaattttaaatctgtgtacatgagggaaacttgttgtattagtcagggttctctagagtcacagaacttacggacagtctctagatagtaaaggaatttattgatgacttacagtcggcagcccaattcccaacaatgattcagtcgcagctgtgaatggaagtccaaggatctagcagttactcagtctcacgcagcaagcaggagaaggagcaagagcaagagcttcactcccttcttccaatgtccttatattgtctccagcagaaggtgtagctcagattaaaggtgtgttccaccacacctttaatcccagatgaaaaggtgtagcccagattaaaggtgtgttccttaaactcggagattcaatcttctggaatccatagccactatggctcaagatctccataccaagatccagataaggatctccaagcctccagataagggtcactggtgagccttccaattctggattgtagttcattccaaatattgtcaagttgacaaccaggaatagccactacacttgtttatactacctttaacatatcttttctagtttgggtatcaggctaagactgaatttatagaatgaatttagtagaattctttcctttctttcaaatggtttgtttatatttatttattttatatatatgagtgttttgcctgcatatatgtatgcccgatgtgtgcctggtgcctgcagaggtcagaagaggacacaaagaacacagaaacagatagtttctggtgacataaactgctaaaaggaccagggggacaatattctgtacattgtttttcctagttagttattcctcttagaggttattgttttcttttgccaagagtaacttcatttttagtggttaggtcaagttgttatttcattttgtttatactttattatgaagagttacctaaggccattttatgcaaatttaagatacattgtataataacttagaggatatttcttccagtatcccacatttttccttccttccttccttccttccttccttccttccttccttccttccttccttccttcctccccttcctccccttcctccccttcctccccttcctccccttccttccttccttcctccttccttccccttccttccttccttccttccttccttccctcttgtcttagtttcctagacagctttgcctctgctttcatgtcctctgttcatttatgattttatctatctttacatagagtctaggacatacaaataaaactttttgagactgatttaatttgcttaatatgattattcctgcttttattcattttttgcagacagtatagctccattattgtttgtggttaatgatttacacagtacatgtaaatcccagtttctttattgtcttcttctaggggatggacacctaggttggttccacaacctaactgttgtgattagtgtctcagtggtgctcagtcactcagaagatatcttgaggagcattgtgttgatttccacagtggatggatgatttatgttcctaccagcagtatgaccattgccttttgtctgcatagtatccaacatttgttcttggttgttttcttgatgactaccattctgacagaattagacagaatgccaaataaaatttctgatgactgatgatattgacagtctttttatatttattggctatctgtaccccatagtttgctcaatttagacattttgttttcctggccattttctctaaggactttaaatcaatgtatcagaaagatacttacaaatcagcgtttgttccaggactatttatcatagctaaattattgaattaacctgctcatatgattagtccatttattgattcagatatttctttatttggtgtgtattttagtttactttttgcatttttttagatgttattcttctttcagatgcataggtagcaatgattagtgaaaatgcctcccattcttttaaggccgtctcttctaattggtttctttcctgtgcagaacatttttaaattaaaatattttatcagtcgattagtagtattttgtgacaaggatactattcagaaaatagcctattccaatattttgtagtgttttttttcgttactctttcctccatcacttatagagtcttgggtctcatcaaggtgctctgtacatttggggttgattttcttcttcctttcctttccctttaccctttccccctttcccctttccatccccctcccctttcccttctctccttctccccttctccccttctctccttccttccttccttccttccttccttccttccttccttccttccctccatccctccctccctccgtccccctccctgcattccttccttccattttcctttctttcttcctttctacctttctttgtgtttttttttttcctttcttacactttggcaacagtacttttttttttttcttcagttaaaatacaatatgaaaaaaccaaataggtcaaggaagtttctagttccctcttttcacaagctctctggccaaaggggaatgggataccacagagaaagggcgtggggacagagtgcactatatcagagtgggtaaaatccaggaatccacccaccatttgtgagaagggacagattgtccttctcaaattcatctgaacaaaattttagttttctagcaaaacatcataaattctaccttttaggctaattatttaaagttcagggtgggctatccttagaggatttgaggtcaaggattttatgttctaataatcacttttaagaaatacacatcttttaaaaatgtttttcttctgctataaaaattttacaagtgtattccaaaatatttatttattttcttccttcctccctcaagtatttcataatttaattatcaatatattaatatctttcactccctttcttaggtttatacctaggtattttaaaagacaattatgatgaaattgcaattttgaatttcttccttttatatacctataatttacttctcatgtctagttattttagttaagatttttcagcactgtaatgaatcaaagtaagaacagtcaacatcattgtcttgtgccttatttcagtagaagagtttttctctatctaataaagaattgcttgtagagttatcagtggtagttaatgttagttgttaacttgacagaatttagaatgatctgggatataggcttcttggtatgtctgtggggagttaccttgattacattaagaaagccctgcccactgtaggtggtataattgtctaggcagggaatcttgactgtttctttactgaggatgcaatatgactagctgcttcagacttctgctgatttcctctgcactggtagactgtgaacatagaactatgaattaaataagcactttctcacatcagttttcttctagagtattttattataacaggaaaactcactaagatgtaatctaaaacctttattattttttgttacatattttctattctaagtttatctttaagagatgttggatttgtcaaacatctagagataccccttttattgagataatcatgcaaatcctgtctttgagtccctttgtgtattgtaatattcattgacttgttaatgttaaagcattcttttttttttccattttttattaggtatttagctcatttacatttccaatgctatacccaaaagtcccccatatccacccacccccactcccctgcccacccactccccctttttggccctggtgttcccctgtactggggcatataaagtttgcaagtccaatgggcctctctttccagtgatggccgactaggccatcttttgatatatatgcagctagagtcaagagctccagggtactggttaattcataatgttgttccacctatagggttgcagatccctttagctccttggctactttctctagctcctccatagggagccctatgatccatccattagctgannnnnnnnnnnnnnnnnnnnggagccctatgatcccatcccattagctgactgtgagcatccacttctgtgtttgctaggccccggcatagtctcacaagagacagctaacatctgggtcctttcaataaaatcttgctagtgtatgctatggtgtcagcgtttggatgctgattatggggtggatccctggatatggcagtctctacatggtccatcctttcatctcagctccaaactttgtctctgtaacaccttccatgggtgttttgttcccaaatctaaggaggggcatagtgtccacacttcagtcttcattcttcttgagtttcatgtgtttagcaaattatatcttatatcttgggtatcctaggtttggggctagtatccacttatcagtgagtacatattgtgtgagtttctttgtgaatgtgttacctcactcaggatgatgcactccaggtccatccatttggctaggaatttcataaattcattctttttaatagctgagtagtactccattgtgtaaatgtaccacattttctgtatccattcctcggttgaggggcatctaggttctttccagcttctggctattataaataaggctgctatgaacatagtggagcatgtgtccttcttaccagttggggcatcttctggatatatgcccaggagaggtattgctggatcctccggtagaactatgtccaattttctgaggaaccgccagactgatttccagagtggttgtacaagcctgcactcccaccaacaatggaggagtgttcctctttctccacatccacgccagcatctgctgtcacctgaatttttgatcttagccattctgactggtgtgaggtggaatctcagggttgttttgatttgcatttccctgatgattaaggatgttgaacattttttcaggtgcttctctgccattccgtattcctcaggtgagaattctttgttcagttctgagccccattttttaatggggttatttgattttctgaagtccaccttcttgagttctttatatatgttggatattagtcccctatctgatttaggataggtaaagatcctttcccaatctgttggtggtctttttgtcttattgacggtgtcttttgccttgcagaaactttggagtttcattaggtcccatttgtcaattctcgatcttacaacacaagccattgctgttctgttcaggaatttttcccctgtgcacatatcttcaaggcttttccccactttcacctctataagtttcagtgtctctggttttatgtgaagttccttgatccacttagatttgaccttagtacaaggagataagtatggatcgatttgcattcttctacaggataacaaccagttgtgccagcaccaattgttgaaaatgctgtctttcttccactggatggttttagctcccttgtcgaagatcaagtgaccataggtgtgtgggttcatttctgggtcttcaattctattccattggtctacttgtctgtctctataccagtaccatgcagtttttatcacaattgctctgtagtaaagnnnnnnnnnnnnnnnnnnnnnnnnnnnnnnnnnnnnnnnnnnnnnnnnnnnnnnnnnnnnnnnnnnnnnnnnnnnnnnnnnnnnnnnnnnnnnnnnnnnnnnnnnnnnnnnnnnnnnnnnnnnnnnnnnnnnnnnnnnnnnnnnnnnnnnnnnnnnnnnnnnnnnnnnnnnnnnnnnnnnnnnnnnnnnnnnnnnnnnnnnnnnnnnnnnnnnnnnnnnnnnnnnnnnnnnnnnnnnnnnnnnnnnnnnnnnnnnnnnnnnnnnnnnnnnnnnnnnnnnnnnnnnnnnnnnnnnnnnnnnnnnnnnnnnnnnnnnnnnnnnnnnnnnnnnnnnnnnnnnnnnnnnnnnnnnnnnnnnnnnnnnnnnnnnnnnnnnnnnnnnnnnnnnnnnnnnnnnnnnnnnnnnnnnnnnnnnnnnnnnnnnnnnnnnnnnnnnnnnnnnnnnnnnnnnnnnnnnnnnnnnnnnnnnnnnnnnnnnnnnnnnnnnnnnnnnnnnnnnnnnnnnnnnnnnnnnnnnnnnnnnnnnnnnnnnnnnnnnnnnnnnnnnnnnnnnnnnnnnnnnnnnnnnnnnnnnnnnnnnnnnnnnnnnnnnnnnnnnnnnnnnnnnnnnnnnnnnnnnnnnnnnnnnnnnnnnnnnnnnnnnnnnnnnnnnnnnnnnnnnnnnnnnnnnnnnnnnnnnnnnnnnnnnnnnnnnnnnnnnnnnnnnnnnnnnnnnnnnnnnnnnnnnnnnnnnnnnnnnnnnnnnnnnnnnnnnnnnnnnnnnnnnnnnnnnnnnnnnnnnnnnnnnnnnnnnnnnnnnnnnnnnnnnnnnnnnnnnnnnnnnnnnnnnnnnnnnnnnnnnnnnnnnnnnnnnnnnnnnnnnnnnnnnnnnnnnnnnnnnnnnnnnnnnnnnnnnnnnnnnnnnnnnnnnnnnnnnnnnnnnnnnnnnnnnnnnnnnnnnnnnnnnnnnnnnnnnnnnnnnnnnnnnnnnnnnnnnnnnnnnnnnnnnnnnnnnnnnnnnnnnnnnnnnnnnnnnnnnnnnnnnnnnnnnnnnnnnnnnnnnnnnnnnnnnnnnnnnnnnnnnnnnnnnnnnnnnnnnnnnnnnnnnnnnnnnnnnnnnnnnnnnnnnnnnnnnnnnnnnnnnnnnnnnnnnnnnnnnnnnnnnnnnnnnnnnnnnnnnnnnnnnnnnnnnnnnnnnnnnnnnnnnnnnnnnnnnnnnnnnnnnnnnnnnnnnnnnnnnnnnnnnnnnnnnnnnnnnnnnnnnnnnnnnnnnnnnnnnnnnnnnnnnnnnnnnnnnnnnnnnnnnnnnnnnnnnnnnnnnnnnnnnnnnnnnnnnnnnnnnnnnnnnnnnnnnnnnnnnnnnnnnnnnnnnnnnnnnnnnnnnnnnnnnnnnnnnnnnnnnnnnnnnnnnnnnnnnnnnnnnnnnnnnnnnnnnnnnnnnnnnnnnnnnnnnnnnnnnnnnnnnnnnnnnnnnnnnnnnnnnnnnnnnnnnnnnnnnnnnnnnnnnnnnnnnnnnnnnnnnnnnnnnnnnnnnnnnnnnnnnnnnnnnnnnnnnnnnnnnnnnnnnnnnnnnnnnnnnnnnnnnnnnnnnnnnnnnnnnnnnnnnnnnnnnnnnnnnnnnnnnnnnnnnnnnnnnnnnnnnnnnnnnnnnnnnnnnnnnnnnnnnnnnnnnnnnnnnnnnnnnnnnnnnnnnnnnnnnnnnnnnnnnnnnnnnnnnnnnnnnnnnnnnnnnnnnnnnnnnnnnnnnnnnnnnnnnnnnnnnnnnnnnnnnnnnnnnnnnnnnnnnnnnnnnnnnnnnnnnnnnnnnnnnnnnnnnnnnnnnnnnnnnnnnnnnnnnnnnnnnnnnnnnnnnnnnnnnnnnnnnnnnnnnnnnnnnnnnnnnnnnnnnnnnnnnnnnnnnnnnnnnnnnnnnnnnnnnnnnnnnnnnnnnnnnnnnnnnnnnnnnnnnnnnnnnnnnnnnnnnnnnnnnnnnnnnnnnnnnnnnnnnnnnnnnnnnnnnnnnnnnnnnnnnnnnnnnnnnnnnnnnnnnnnnnnnnnnnnnnnnnnnnnnnnnnnnnnnnnnnnnnnnnnnnnnnnnnnnnnnnnnnnnnnnnnnnnnnnnnnnnnnnnnnnnnnnnnnnnnnnnnnnnnnnnnnnnnnnnnnnnnnnnnnnnnnnnnnnnnnnnnnnnnnnnnnnnnnnnnnnnnnnnnnnnnnnnnnnnnnnnnnnnnnnnnnnnnnnnnnnnnnnnnnnnnnnnnnnnnnnnnnnnnnnnnnnnnnnnnnnnnnnnnnnnnnnnnnnnnnnnnnnnnnnnnnnnnnnnnnnnnnnnnnnnnnnnnnnnnnnnnnnnnnnnnnnnnnnnnnnnnnnnnnnnnnnnnnnnnnnnnnnnnnnnnnnnnnnnnnnnnnnnnnnnnnnnnnnnnnnnnnnnnnnnnnnnnnnnnnnnnnnnnnnnnnnnnnnnnnnnnnnnnnnnnnnnnnnnnnnnnnnnnnnnnnnnnnnnnnnnnnnnnnnnnnnnnnnnnnnnnnnnnnnnnnnnnnnnnnnnnnnnnnnnnnnnnnnnnnnnnnnnnnnnnnnnnnnnnnnnnnnnnnnnnnnnnnnnnnnnnnnnnnnnnnnnnnnnnnnnnnnnnnnnnnnnnnnnnnnnnnnnnnnnnnnnnnnnnnnnnnnnnnnnnnnnnnnnnnnnnnnnnnnnnnnnnnnnnnnnnnnnnnnnnnnnnnnnnnnnnnnnnnnnnnnnnnnnnnnnnnnnnnnnnnnnnnnnnnnnnnnnnnnnnnnnnnnnnnnnnnnnnnnnnnnnnnnnnnnnnnnnnnnnnnnnnnnnnnnntttcctagggtttctatctccagcgttgcctcgctttgggttttctttattgtgtctacttccccttttagttctagtatggttttgttcatttctatcacctgtttggatgtgttttcctgtttttctttaatgatttctacctgtttggctgtgttttcctgcttttctttaagggcctgtaactctttagcagtgctctcctgtaattctttaagtgacttatgaaagtccttcttgatgtcctctatcatcatcatgaggaatgtttttaaatctgggtctagattttcggttgtgttggggtgcccaggactaggtggggtgggagtgctgcgttctgatgatggtgagtggtcttgatttctgttagtaggattcttacgtttgcctttcaccatctggtaatctctgaagctagctgttttaattgtcactgttaagagcttgttcttcagttgactctgttagcctctataagcagacctggagggtagcactctccttagtttcaatgggcagattattctctgcaggcaagctctcttcttgcagggcaggtacccagatatctggtgttcgaaccagactcctggcagaagttgtgttccactcactagaggtcttaggatctcgtgtggaatcctgtgtgggccctttcgggtgtcaggcgactcagctggcaaggtagcccggggctcgagtggagcggaaggggtttgtgccccagatcaagcccgggtagcctgcttccctatgtaccgcagtctcaggttccgcgcgattggattggtgcaggcgctgtgttccactcaccagaggtcttaggatcccgtggggagtcccgagtgggcccttgcgggtgttgggcaagactctgctggcaaggtagcccggggctcgagttgagcggaagggacttgtgccatgttaaagcattcttatgcaagaatgaagtatgaaaggaagcagacttcatcctggtgaatggaatttttgatatattttctgagttcatttgcaagtaattcattaagaattttgaatctatgttcatcagagatattgatttttcagttttcttgactagtatctttatctggctctggttgcaggatattattcactccattgaaggaatttcttattattcttttttatattaatagaacattttaattttatttatgttttttttcccggatatgagtctgtgaaccacatgcatacctagtatcctgagaggccagaataaggtgtcagatcttctggaattatagaggtcagctataatgtcattgctggaaattgagcccaggttctctgcaagtacaaaacagaacaaaaaaatcaaacaaaaacaaagaaaacaaacaaaaaccaaaagaccccgaacaaacaaacaaacaaaacaaatgtgtaccgactgagtcatttcttcagtctatggactagtctgtgaaacaatgttcttcttttaagattttgaagtctttaccaatgactttacatggatctgtctgttctctctctctctctctctctctctctctctctctctctctctctctctctctttcttcctttctttctctcatgttggtagattttatttttattactacttcagtcttattgcagttatagatttatttaagatgtgttttaaaatctttatttttgtaggcttattagcctagaagtttacctccttttaatttatctaatttagtgcaatgttaatttttattatatgtttcattaatttttttgaatcaatatgtgttattatgtctccttttatcataaattttattaattgggttttctctttctttggctaagggtttgttaatctcatttatcttgtcaaagaaatgagtcttgttttattgattctttgtattgtcccttccattcctatttcattaatttctgccttgatattgattacttatttccttttactaaccttgtgctttatttgttgttatttttccagtattataaggtgtaccattaagttatttatttgaaaacactctgagttttcaatatttctattaacttctgttttagtgtcattttttcttatatcctctacattttggtatgttgtactttctttcagttctaagtatttttagattttcttctttttgtggtggattcgttgttcagctctgtgatggttaatcttgacatgtttgtatgtatttgatagattatcttgatgtttattactagctttatttcattttggtcaaagagaaaacaagaaattatttcaattttcctgtatgtcttaagttttattttgtgttccttcatactcgttgttctatagaatctgagaataatattatgcagtgcttttgtggaatatgttgtctgttagtttccttttatttataataacatttaactcaaatgtttccatcaattattgtttttactggggatatctatatgttggtaagaatgtgatattgaagtattattattctcttacggttaacctgtgtctaaatccaatagtgtttcttttatgaaattaggtatactagtgttggattgctatgtgtttagaattttcattccttcttgatgcattgcttccttaatgaagtgattatccccacttctggtcaagagagattccggataggcttcatctcagtgaagtaccatctcagtgaggtatcttctcaataaagtcttgtctgagtgatgtatcttctcagtggattatcatctcagtgaagtatcactcagtgaagtatatctaagtgagggttagagcagcacctttggagtaaaatttctagcatacaggtgccaatatggagatatagttaatagtttacttcttgatgctctgtctgatttggtgatgttatttgggggaagcaaaggtggtagccattgctgtgggctcctataaacctcaggagcacccttccaggggacctacatatgcatctagatattgtagcttaccccctttttttgtgcatacaaatttgtagaggtcactagtcctttggctccagcttctactgtagatcttctggggtgctccttggtacaagtgcatgtgggagtgaaaaccatgacccggcagtgtggtttctttctttcttttttttttttttttcattttttcccatttttattaggtatttagctcatttacatttccagtgctatccaaaaagtcccccatacacacccacccccactcccctacccacccactctccctttttggctctggcgttcccctgtactggggcatataaagtttgcgtgtccaatgggcctctctttccagtgatggccgactaggccatcttttgatacatatgcagctagagtcaagagctccggggtactgcttagttcatattgttgttccacctatagggttgcagttccctttagttccttgggtgctttctctagctcctccattggtttcttctaactttaactgaaccatgtcctcttttcaaactccgctaagctttactgccacctttggtggtctaggtaactattcttgaagggctggaatgcatgaaggggagaacatctgtagtttcagtcacctcaccagagccactttgctgcagctggacacagaactgctctcaccttcttccccgtggagatctaactggggccccaaaaatggtttttagctattgtctgctgcaggagatggttttgcatcaatcatagtatttcatctgacccaatcacatctgttgtttctccttgttactttattagtaactgccagccatgttgttgtgtcacagtagacatacataatacttctagggaagaggatagcacagcaccaagttcaagctgcctttcatttggagaagacaccatgttttgctctcgtgttccctggctgcccttgttctaatcttcctacactcaagactgagagttcaatagtctttcactgtggttctcattaggtttgtgtgtggccaaggagattaagtgacctctcatggggtagcatgcttacttcagagatgattcccacatttcttgagccatcttctgggctacaggctccccaggggtgttaaagggatattttctgccagtctctagaagaattaggttctaggcctaatttcacatttataaaccttgaatttcaactaatgtcctgatctgacctttattctgagtttctctggagagttaattatgtagctagcacttgaaaagagaggatacctgccttgcttatttagatcactacttaattaccaggagcaagtttggaatatgatttcatattctttaaggccaagattttcatttacttagtttagtaaacacttactatatgattattatggaaagaaaagactaagggctattgccaacatgattcataccctcaaaaacctcacatttttgtagaacaaacatagttggatggaaaatgggggcagtagtgagatgtgataatggaagtgtgaacacagagaggttaggctgagtaaccagatgacaaatcatctctcaaaatgtaaagcaataagagttgtggatgccaaccagtgcttgctaacaggagcctgacatagctgtctcctgagaggttctgccagtgcctgacaaatacagaagtgaatgctttcagccaaccattgcacagaacacagggccccgatggaggagctacagaaaggacccaaggagttgaaggggtttgcagccccataggaggaacaataatatgaaccaaccagtaaccccagagttcccagggactaaaccaccaaccaatgagtacacatggagggaccaatggctccagccacatatgtagcaaaggatgtccttagggacatcaatgagaggagaggcccttggtcttgtgaagggccccagtgtaggggaatgctaggacaagggagcaggagtgggtgggttggtgagcagggggaggaaggaggggatagggagttttcagaggggaagcaaggaaaagagataacatttgaaatgtaaataaagaaaaaataaaataaaagagagagtaattattgaaatacaaaaaataaaaagtaaaacaaaaagtaaattaaattcaacttggatttttggaactttgataactggtttttgatacattaatggactgagaaccagtagtcttaacaaaattgtgacactaaatcacaaagttcttttgtcctatatctttttcctttagttttcatctatcatgattaatatgcattgtcagcttacatagattaagaagtgccagagactggcagtgcagaccattggatgtgcctgtgagggcatttccagggacagtcacctgagaggaagaaggcctacctgagtgtgggcagtaccactccatactctgcagccaggatagactgaaacggagaaggtgacagtcatcactccttctctgcttcctgaaaacataggggaccaggtttactttgtcactttccttgccaaaactatttgcttaacctcagtccagagacagtagagctggctgagcactggtggaaatgtctgaggccataagttctatcatcgtggttctaccaggttcttttcacaacaatggtagcacatagcctatacggtatagtgagtatcaataaattgtaaagtaaaccagtggtataaaaataaagaacaagatttctatggttgtaacatattttatacctaagtccacaagtagacacacacagacagaatatttttgccttactgtaattaaagtaatatagcttgcaatagttgtaattttgtgacttacatttgcataagccccagcctatcttagtaggcaatctgctcttggaaaactgtctggcaatgccttttaggaagcaaacaagttatacaatttgtcttgtaatgtacatgttggaaaaagaatcccagggaatatttacaataatgataaacagcagatttaatgctagtacgagggtggtatcttaactgtgacgtatcagggcagtggtgaggtaaacacagacactgaagttctaccagcactgcggctgtgctggagagttttcctgcttgttcctgtgctatgccagccaccaatgaatttgtctgcctgaataaacgcacttatatatctgtccctgtttatatatctatatctacccatgtttttatcatgtttctctagatttgagtggaagatgttaaggaatatataattcaatttgtcttatgatgacggaagtagttgggtaatatatttccacttggtaattgagtatatttttgtcttattttgtttttaattgatatttctttttagaaatatttacaatgaaatttccaagccagaaggatatggttagcttattttgcaacagaaaggactggtgtggcttgcagtgatgtgcctagatgaccctccaatacttatctatatgatttcctttctattgaggctgttagagattgggacttgcttttaggcaatgccaaaattagatagctaaggttgtgggtcagcctctttttctttttattgcatatgtttacctctaatatattagatgtccttaaaaatgcaaacagctgcaatctgatactctttcaagatgggcagatgagattgagatgatgttagttctacaaatcaggtcaattagttaaccatccaaggaggcagggagtgtgatctttcctcgtcagtgtccagataggatatcagcacagctgatacctggattttatccctgggagacactgaagtgtgtgtgtnnnnnnnnnnnnnnnnnnnnnnnnnnnnnnnnnnnnnnnnnnnnnnnnnnnnnnnnnnnnnnnnnnnnnnnnnnnnnnnnnnnnnnnnnnnnnnnnnnnnnnnnnnnnnnnnnnnnnnnnnnnnnnnnnnnnnnnnnnnnnnnnnnnnnnnnnnnnnnnnnnnnnnnnnnnnnnnnnnnnnnnnnnnnnnnnnnnnnnnnnnnnnnnnnnnnnnnnnnnnnnnnnnnnnnnnnnnnnnnnnnnnnnnnnnnnnnnnnnnnnnnnnnnnnnnnnnnnnnnnnnnnnnnnnnnnnnnnnnnnnnnnnnnnnnnnnnnnnnnnnnnnnnnnnnnnnnnnnnnnnnnnnnnnnnnnnnnnnnnnnnnnnnnnnnnnnnnnnnnnnnnnnnnnnnnnnnnnnnnnnnnnnnnnnnatctcataagaaccttaactttgtattatatcaactgacttaaaataaataaatatctttttgtgactctatttctaagtttttattcatctttttaaaaagatttatttatttattatatgtaagtacactgttttcagacactccagaagagggagtcagatctcattacaaatggtagtgaaccaccatgtggttgctggtatttgaactcaggtccttcggaagagcagtcagtgctcttaactgatgagccatctcttcagccctttatttacctttttatatttaagcagtataaaaagtcatctttgtttgttatctactttcctgtgtagttgtgttttttttaagtcctgaaataactgtactaattacttattaaatactaggccagatgtcattgtgtttctgagtggagggaactaaggatctcccagtaaaaggtttgttactaattcttcaggtgggaacactcagaaaatgtgtcttccctaggaaatcatcattcctcctggctctgcctgtccttggctggaatctgcactagctggcctctttactgggatttgagtggcatgtgctgctgtcatgttggactcatattcacagcataccttcaatatcagtttcacatgtacatgggttcctctcccctttgtcctgtaacaaatgtttgagaatctattaccacagttcacagttttaatcatggcagccactgaaggcctttggagcagcaaacatgagccagggacttttgtctacatcctgctaactaggttaagaggcaaagaggtcccctggccaaggtcatgcaggcaggcagaatataggaagtgggcttattgtcaatgctctattagttagttaccaagagtatctttcactaaaaacactgtatttgcagtttgctttttttgctttctgagaatttgactaccctagactaaggtagtgagaagaaactaaaaatgctctgttacaaagcaaaattcatattctattgtgtttccagtcagaaggttttaatatttgtccaagttgtgaactgaagcttccttctcttccttactcactgcctacagtacaatattataactacacttggaagttatattggcatgaatattactttatagaagaaaaccactataaattataacgagttttttttctttttgtaatgagatacaagcagaaccataaggaaaatgctggcttatgaggtgatggattgctgttgcaggagcgagagaaacttttatatttacatgttgtaagcgaaggttgaaaatgataagtcttcatgggttttattggttggtaatttttttcttggcagatagcaaaggtaccgaaagtagtgaaatgagatactcaatatcaggagttcattttttttttcaaaaacttaaccacatatactttttgtatattattagccaactctgagtctaggcagaatccccagtttactcatgaattacttgattcattactaaacagggaaaaataattttggcctaaattagaaggaaaatgtcgtcatcaaaaagctgttttctcaagttttattttcaagactcaaagacacgtgtaagattggtttgtgcctcgagtccttctctcttcacatgtacaggtacttggtacctgtgagatgatgtgagggacttgttcaaagccttgggcctctgtgcatttatagtccaggcccgatgttaaggagacccacggccaagaagcagtatgtggagcaaggagggcttgggacgctggtggaaacttggctctaataattgactttggtggtcacctctggcaagaagcctaactttctgcattgttttgtctgaagtgtttcaagtatagttaattaaaaagccatatcatgcacgtgttgcttctgctgctccaggcactgtgccaaattatttgcatttattttctccttgcacaaatcctttgaggtaggtattgcctgtgttgttcaaaggaagatagggtctaagatgatgggtgttggtgagctgcagaggaggaacccatgctccccatattcatggtttgctttctctctcttagaattttgggaggagaaagcaacactgaatcactactgagtatgtcaagtgctgaggctaagttattcactgccactgagagtgttcattgtctagaggggatccatcaagaggaagacgaactttaaactggggaggggggctggttcacaaatgaagatagtaggcaaagaatgtcctagtgcatggagatcgaattctgcaaagatatgtacctgggtagctatttgggccttgtattcttctttgattcaggggaaagttcttgagatggttgatgggaacagcaatgaagaagtaagcaggagtcaggtcagtcatagacattgctctaaaggagaagtgtgtgcacattgtaccctaaaggaagactgtatgcacattgtaccctaaaggaagactgtatgcacattgtaccctaaaggaagactgtgtgcacattgtaccctaaaggaagactgtgtgcacattgtatcctaaaggaaggctgtatgtgcacattgcactccaagagcacttcgtcttctgttgatttatcatttacaactttcgtgtgatagttcttgttttattttactatatctaaaaaaaagaataaatgaataaattaatgaaaacttgaccactagcataaaggttaacagctaagctatcccttattcttgctgggagaggaaaaatcagtttcttccattagagaggcactggatatttcaatcactgtaggataggcttcatttttgggtgtagtagactaatatatcattagactccacagatctctttatatagttttatttggttacaatattttttttcatttcgttttggatgtggttttattggtttggtgtgtgtgtgtgtgtgtgtgtgtgtgtatgtgtgtgtgctgaactggtttttgcctctttttttttgagaaagaacttaaagttgggtagacatagaaggggagaggatctggtgggacttgggagagggaaaaaaaaggataaaatgtatttgaatttgaaaattgtttttaaaattgaaaactactataaaaattttaaaagattttaagttattatgtttgtttgtgtgtgtgtgtgtgtgtgtgtgtgtcggggggggactgtcttactgcctcttgttttatgctgacaaaatcatgtctctatttcaattggatccattgaaacttgtttgtactaacttaggcactttatgagatgtacacaaaagccatgcgttttaccccttctagtgtgttttgatcaatctgcattcaatgtgatttttggcaattccacccccacacccctttttctctgttgtcctgatgattgaacccatggtctcctgcatgctaggtaaatattttaccagtgatcttatgcctcctaccaccataatggatcattgttcaatgctaacactggaaacattggttgtttttgccaattaggcatcttaagatgtttggtagtgacacagaagttgacatgattttaattgacttgatatttttcattcttagagaattaacaaatcaaatacaaatattttcaaacctatagtcactactaattaatcatacatcatttagagaaattgttattatttacatttacacggtagagtactactcagctagtaaaaatgatgaattaatgaagttcttaggtaaatggatggaactaatatcatcctgagtgaggtaacccaatcacaaaagaacacacataatatgcactcactgataagtggatattagctcagaagtttggaatacccaagatacaattcacagacaacatgaaactcaagaacaaggaagaccacagtgtggatacttcggctttcttagaaggagaatcaaaatatccatgggagaagaaacagagacaatatttgaaccagaaaccgaaggaaaggccatccagtgactgtcttacctgaggatccattccatatacagttaccaaacccagacactattgtggatgccaacaagtgcttgctgacaggagcctgatatagctgtcccctgagagactctgccagtgcctgacaaatacagaggtgaatgcacatggccatccattggactgagcacagggtctccaatggaggagctagagaaaggacccaaggagctgaaggggtttgcagctccataggaggaacaacaatatgaacctaccagtaaacccagagctcccagggactaaaccaccgaccaaagagttcacatggagggacccatggctctagctgcatatgtagcagaggatggacttgtgggacatcaatgagaggagaggcccttggtcttgtgaaagaccccagtgtaggggaatgccaggacaaggaagctggattgggtgggttagtgagcaggcagggggatgagataggggggtttggaggggaaatgaggaaaggggataaaatttgaaatgcaaataaagaaaatatctaataaaatattttatatttaaataaagcaagttttaaaatgcctagtttttgctctttgctaaataaactgacccatgagatagaatttggatcattttattgtctgtcagttttaaagtgagatggctgggactagagagatggcttagcagtgatgagcagggtttactcttacagagagcccaaggtttatatcctgtcacctatataacagctcaaaactctcagtaacttcaggccagagggttcaataacacactttggcctctgtgggtacctggcacacagatattacacagagatacatagagggaaaacatacctacatgttgaataaaataatatttttaataaaatgagatgactaaggtatagtgtggttaaagcttgcttcggtcacacaaaataacagcttttagagctgatacaaactgaatctagtgtctctgactcctgactgaagttcccaactctaagaactgttatcaggggctttcaatgaagtctcattttccatttgatgttattattgtttctcagtatatcacccttgtagacatatctgaactcccaagtgctctgatgaatactggttggataattctaatcttcttgatgcattctatatccagcaagaaaggacatggccgactctctcagataacagaccattttatagaaaaagacttgacttgactaaatgcatttggcaacacacttccaaaaataaacttatgaatgcagttgaacaaaagttttatataactttccttaacagtgtatgttcctacaaattatatttaaaaattgcccaatggaaagtcattacttttagtttacttgcagtttttaaaaatgttactaagaatgcagttgccaggttccacttagtcacatttttatagtccagtcattaaactgctgaaaaaaaaagtgtcttaaatggaaacattgacatagggctcattaccctggctccaatgcactgctattgtaaagtatctatcttctaggtcattttcttaagatgcttttgaaaaggcactggaaaattaatgtaacagtggagaacttgattctatgcataaaaattttaaacaatccaaaacagtgaatgtttacaacaccaatgagtttatttggaattaaagtttatcatgaactttatgatatttaaagccttttacaattggcagtatattatttctgctctgtttttaagttttttttttcttttatttgacaaaatacttgttaagtgtctctgttcaggctagcaacattacgtacaatcactgtcaataagaaagcatcaagttttagaatcttaaagggatgaatggcactcatctttgtaaattaacctttggtacttaaattttaaagtgtgttctccatggttagatagtacttaagagtagagatggttgagtctaggatatgctgttcctgctgtcatcgttgtcattgtcatcatcatcatcatcttcttcttatcattatcatctcgttatcatcattgtcaatcattgtcataaccaaggtcaatgatcattgttggcatgtacattttccaaaaagaagagaagcaagggggaactgacccaaatgagatggtccaggagtactgaaatatgtttcatccagagaggtcgtttttttggcacatttctgaattgtgtgtgtgtgtcaaaagttgtaaaactggaaggatttcactagttatttgaaaacttctgccaaattttaagtcgttttcaagtaaggggtggtaagcttgagtgttttttactctataactctggaaaagttgtatttctatctgcttcaggttgtatgcctacccaatggagataatgataggatcaagctgataagatgttcctgacacttaaaagcattttccatagtgtggattcaataggtcttgtgactcttacagtgagtagatgcatgttatgttgttccagggaagaatgtcagaacaggcttgcaagcttggcttctcatcctagtttcttatttagaagttgttcagcaaagttagtgtactccctaaggacttttattatgagaaaagtggggtaattatacataccctgtaggctctttgaaagaaagagattatgtatgtaaatgatcaagcatggagtcagacctgatagtaggtggtcagtgaatatgagtcataattatctgcaaaaacaaacaaacaaaatccctcagtaataattagatcgagtgctcaaggacccttgtcattacataatagcgtggctttgttcagtaaaataaagaaaaagtcagtgttttacagagtctctcatagttaactcccagccaaaagaaatacgttacagagtaagtggttgtaaatgttatgttctatttatacatgaggaaggtgttgtgaaccatggagccgtgtttaaatgagggctttcttgtttcttagcttgtaaaatatctgcagttgatcattattattattattattatttgatacgggatatagctatgtagcctaggcaggcctcaaacttgcagcagttctcctgcttcagccttctgagtgctgggattgcagacacacactatcataccaccttgaaatagcataattttcaatgtctgtaagtaaatgtggacatgtatgctatagccctgaacttttgggagtaagatgaggaggatctcttggcttggtcatatctttctttttactttcctgcctctcccccaacaattctcctctcaagatttcatacttgaccttaaaatcacagagatttccagctgaaagggactagtctaataccctaagtttatacccaaggaaactgagacctgaggagttaagtgattgctcccaaggccatataataaattagtggcagaatcttggcttcttgttttgaagtccagaatgtttaggaaaaagaaataaaaattggatccaggcaaaacagaaacctttagtttaggagaggtggttttgtggctctaaaaagtgacctgcaacatagggctggaaagagcttagttggctgatttgatgacacctgaggtggagattggctctcatgaggttactgggacaaggccagaaactccagaaagaatattatattattaaatatgctcagatattacttatcaagaaacgtcaggtggattcagaaaggcaagcagagtgtgtttcccaggctcgtagcagggaagaacctgagttctgggaaggtgctgccagcagatacttcaggaagctgcatcccagcagatacgtcagaaagctacatcccttttggatggtccatttcctgagtacagtaaatgtgttctgatccagatatcatgtgattgtgctgataaacaaggtgattcataagatgagtttagcagtgttcctggcacaccccgtaaccacttaactaatagctattcatgcgattccagctgatcagcctctgtacagtaaaaggtctgttcaggggagatgaacccttcttcagaaaggacccagaagatttactaggttttcagagttttatctaaatcacctactattcagaacgaggaggaaagtgataaatgataaatggaaacagagaggagataatcttagaagtaaaacaatgtattacatgcagttaagtaagtagtgtgtgtgcatgtgtgttgtgcatgcgtatgttttgcatatatgtgtgtgtgcatgcatttgtgagaatgtgtgtggtgctgggatcaaacccaggtgtatcttagcaactatcaccactgagctacactgtagccctaaagttttgactaacagcctatgtatagaagtttctaaaaacataaactatttcattcttatatatatctttctctctttatcatacttgattaacaagattttatagtcactaaaaaagcctttctggataatcagctctcctattttaataaactgagctacaggaatacccttaagtaaactaataagcacttttctttggcatttattcaaaccttttctttagagaatcatataaaattacaaattgtctccatgagaggataatattaaatatgatgtagaatagatgagttaatttgtaaaattaatatgggagaaaatgaagactcatatcctatagagccttctgattgtcaccttggtggttgatcctggatggttctgaaagaagacacaggagacagacattagattgctctgtggtgcttctttgagaaaaagtaattgttgtgcatttaaaaggaattgctgactgaatttatttgagaaatatcattttaaaaaagtgtaggcctctttggagattgaaaactcactaatctttttgatttatttttcccaagaaaagttatagccctggtagtctggaactcactctgtaggttaggctggccttgaactcagaaatctgcttgcatttgcctcccaattgttacagtcaagatgtgtgccaggactgccctgataatccttttgatttgaagtaatcagttaaaaagagccgttgaacttgatttatcaaacttttttgagcaaagagaaggtatatatatattagtgtctgtggatttgtgtgtctgaatggaggagttactcaaaaagagaccttttacttttaacttgttatgtatgtatatgtttcatggaacttgtttgggaaatgtcagttaacaatctagtacaagatgatttccaggtaggtttaaatatagggacctctcaagagccaggcccagtgctaggagacagaccttaaacccatgagctaacgattcatctttctttgttcattgcttcttccaaaactactatgcataggaactgtaggaggaacttagccaaacaggctcagctgcagtgttggcatatgtgccactgatacttcctctctgagccaacctaaactctgccagcacagcaagagaccgctggtgctggacaaggcaatgaggctagccattgagagaaaatatcatacttggctcttgcgcgcaccggactggccagcaagaacgatgctgcaacaggatccttccacacacgtctattgggagagcttgattgcagaggcgaagagaccccaagcccagaactggtgctgcttacatagacctaggagaggtgtgtctcacacccggattggttgtgcttgggttatgcttaccacctcatttgcgtgcctacatatgattggttaacttctctctcatctgattggttaacttctctctcatctgattggttaacttgtctctcatctgattggttaattctcaaaacctcatcttagcaaaaaaactttactgtctatgtatgcgtggtggccagcggtagccagcccaccctgcaacggcacaggctactcgagacccaatgagatgccagaagagaggggtggggtataaaggtttgcccagttcctgtaataaacaagtttgctttaccacttgcccaactcctggagtctctgttattgactctgcaccttctcacccctgcccccaaggttcttggtcagagttgcaggcaacaaggaccttggtgaccaagatcaaggtgccgtcagaaatgaggtagctgcttcatccctgtccctgcctctgctcttttgtcgtggatttatttttcctgagaatctctgacttgcttacttagtttctaccttaatacgatcatcccagccacctcctaaggtgaatctttgagccgatgcaattgactgactcctgacttgcaaaccagtagactggcatagggatggtagctttacatagttgaacactttatagagatgttgcttcaaggagtctcaatagaaatatttactaaacatatcttgtaggtgaaaagctgtattttgggagacaggcaatggcaaattattctcaactcattctgttactatatataaaaatttctcagtgattttcacaattactcatacgggaggaatatcagacaaactaaaatataactatttcacaaacagccagttaaactctaaataaccaaaatatctttgctacccttgaactttttagataatgtggtatgttcatatggtgagaggggcagggcatcgaagaccaggtgtgtcctcttaagtagctaaagagactaagaacacagggttttttttttttttttttttttttaaactgatgtaacagaaggacttaaatttcttttcatgttgctttagaaggtttctactgactctgcttttaaattactttgggagacacgacttcctaatttaacattttattacatgtcttgcagaatacaatcagggctcagccatggtctatatgcctgtaggagtccaactcttgggtgtaaccaatgttggagacataggtacacacagaataatgttcagtttacctccttttaaatgattgtctcacagcctaggaatggttaaggtatgttttgaggtctttaatcctctgtcaacttggaatggttgtcttgtattgttagaagtctgggtctgtttttcttctagttgcatacagagagatctgtgaacctttgatcagctgattgggcttaactcacagttttgggggacttgagaaaggaagtaattaaactgtgctcaactcatgggttcttttgccccatgaatttaacagggagagatttctttagatacctagctctgaagtgctctgtctactacgcatggtggtcttctattcctttttttttttttgcattgaaaagtctttatttcctctgaaaatttcctgttacagtgtgcaaattattatatattcatgcctttttaaatacataagaacttttactgagcaaaagacaaattattcaataccagtagcacgtaagtatttgcaagaaactgtttttttttttaattcctttaaatgattgctactattaggaactagataacaattctagaaacaatcttgccagaagttaataattattaataattaacattataattgtagatattattttagaaatgtccactattctagaagttacccatggccatggccattttattatataaaaatagaaactgacatttattatatatgctttcttggacaggcacaccaacaagaaaaaatatacaaaagcaagaaggattagttattggatcttatcacttaatgaaataccatttttggtttccagaaacaggcatgcatatttaaatactttcaacaaacaagtaaaaaaaattttgatattagcaacttcaaaatttaaaattactgaaatgtttgcaatatgtaaaacagcaattttattcctatgacttaacacatggttttacaacacaacattaaggtttgttgttggtgttgttttgaacttactacagtaaaaacaagtattaagcaataattaagaaaacaaaaaaaatgctcttcaaaggtttagcatgacactctgaggcaacaagaaataggtctgtctacaattctaaaaacaattttgtggtatttcagccattattaatcatattcaggagctttaagcattttaataatacactcagtaaatgacctggaagagatttttttttttctgattgcatcaaaaggatgaaaaaagatacagtgtatgctgggccatgaaataaaaaatagcttctgtattgttctacaaggtacagagctgcagtgtccaaaggtgtcaagttattctaataaccctatctagcctaatagtctccttagataaatgtgcacgctgcatttagtaggccttatctctaaaattatcacagagtataacatttttactggtgtgacataactgtgattgtattccaacttaacgttcccatctaagagaaactttcatattgctggtatggagaggcagggccagtacctggtgcattccaggagtgtacttggcatttagtgcatgccctaggtgggcttccggaaacaacagctgacgtaagagctgaagttttgtgacaaagtaggttataaagcgattctgtgcctgatttgtgtgacattatagaaagggaaggataccccagaggagagagctgtacagagggaggtacaggcaacctgagaggaacagcctgggaaatttttcccattttctcaatccaactccttcttcaagggtcagcaagagctatattccttggatttttacatttctgacaaatctgtgctggaagctttggcatctctgaaacctgaccaggttaggaagcagctgcacatggagaattctgtgcttttctttggagccatggctccctgacaggaagcattgggtttatttattgtttatttatttataggcagttctaggtctaaactattgctcaagaaagtaaaccatcagagcttagagacatttaaatgtaggcatcgcaaatagattttctgtcaatggatagccctcattttttcatgtaaagtgtatattacaggttattaactgctacactatattcagttcttgatggtttacttgccagaagagaaacattaatttatgaagtattcctaagacttcaagaactaccattccacctgttattaatgagtttaggaaacagactggcattaaaaatttactgcaataaatataacactgtgatcatgaggttggtttgatatttttccacagatgagttaacaggaaagttccaaagcactattgtccagaagaaccattctcatgttagtgctgcattgatcttcatgactgctctgttataggaggcatgtttccctgcatatctggagaaactgaagataagaagtttaacaatttgcctaatattttgagtaacacagctatgatgaaatagttctgtggattagaagttagtgcttctgttaactcagtagcatcaccttatcaaatgtttgcttgtattcttctatttcttaatctttgaagtttggccaatgagtatgtggtttacatccaaatcactaattattaagaaattaaaattagcaaaatgtctagacaccttattattaacatattcagcttttaacatagaaaataaaaccaacttttactccaaatataagctccttgccagttcatgatagtttagctttattctaccatatttacacatgctttcatctgttatatcatgcccagattgaaaatatagttcaaataaccaaaataagtatgtgagctgactctccagatgtggctttcaacaaaaaaagatcacaattggcgaacaaatttctgtgaacactacataattgttaacgaagcataggacccctttcatttcataactacatttctgggaatcagtccatttgtatttttcacctgctaatgtcacaggtttggtatgtttaaacaggcaaattaatgtgctttataagtgttttatgtttctggaaatgtcctctttgaagaaattcctttttggatttgtggaacctgtttcttctaatttttcctaacaagttggttgttgctttttgaaagaattcaaatattccttctatcaagaagactgtgaaggcgacaggaatttccaaagtagaatgttaggtctgatgtacatccactgttcgaagggttcttctgggtctcctaggactgtactttccttgggagtctctgagttggtttctggaatgactctggattctgaaacttcttgttgtgagctgtctccatcaagaataatatcttcaggatttggcggggctggactgaagccttcatttgggcagattcactggaaaactgtctctgcctgtttgactgcattatcatttcttagaccacagtcagggccagagcacacatagacattggacggtaagtcattataacaatctctgctgatatctgaagactctctcatattgaagtagagtgcccatagaattcttggcttttcaacctgttcattttctgcttctatatatatatatatatggagtaaacaatttctggactactcgttctaaatcttctcttgctgttttagaagacatgcaagtcaaatgtaccaagtatgtgtctttcatgcatgtcattgttgaagagcataactcaatgactcgaacagcaaaatttcagcctgtactgtacaccagacatgtattcttagaaaggtaactctcttcaataatgaaatgtttagagattatcctttgaccaaattgatctataattgctttacattttctggattctttgtccactacaaggcactgtacagaatggcaaagacaaaagattccaccaaacacagcacacattctgcaaaaacactgtggaagttctccttggccatataaaagaaacagaaatggagtgtgctcttgcctgttgttcacaaacttacatgtactaaccatcagtctccttcttcacaatgtctgttgtgagcacttggcttttgcttctcctatattttctgtttgttgtttttgtttgtctaggctaaattctatattcttgccaaaccattttacccctgtgatcacaatcccctatgtaaagtctggagcaaagctccgagtctatagtcgggcccctatagttaccatatctcttataggctaatctacaacgaaataggcatttcacatactattctggcaggttttgaacatattcctttctacaccctcatactatatctgaatcactgttttccataattgtggttactcaaattgccctggggtgaaatttagctgtcatctaggcctgcacaggtctaacattgttttttggttttttgtttgtttgtttgttttttatctcctgattcttgcttttttgatttttttttaactaataaatgtggagttaattcatgcttgaaaacgttgccaatcaattccacaaatttctttaaggtattcttattctaagtcttgagtctttagctgctggtaaaatgctgtgactgcttgaataaatttctgctcagtacacccttcccgtgagtctcaggtcagtttaggcttcttgtcccctgtgatatttttcggtatggcatgtatggtgtaaagccatgagtgtcatactatgtttgggatataagagggaagttaaagagagatggttactgccagtgaattcttacattggagggcttaggagaaatcaagaactctgttttggcttgttgtgtgctttatattagaagtgggtgcagttgacaaactttccaagtaatctagactgtggctcaggccaacacagtcagctcaggaccatcagaagtcacttctagctcagctctaacgaaaaaatatttgaatcattattttctgctgctgctcttttttgtttttgttttttgaagaaaacaagacttttctcaccatgtgctataaggaaaatgatattcctttataacttgtgaaggacacaaatgactgaaggcctttccacatgtccttccttgtgatttcctctttgggtggtgccaaaagccaagtgattaaaaatcttagataggttaaaagagtttcaaaaatatctctaaacattcaaacttcctgtggttttggtgaattctagccagaaatcctcatataacattgctgtcaagggcactacggaattatgtaattcaagagagggcttgtatttcgcaatgagttttcaaaatgtgttattccacatgaaaaatgtgtgctaattgccaaaatggtagtagggaagctcgagaggctgggactcacttgctattctctgtgttgttccattcctttgatgacactgttcttgatctgcaagcagtccataccttgttgccatctggcagctggctccagcaccataaggtgcactgaactgttagcagtaggaaatagtgctctgtattggtcatgatgtgccagcacagacccagaagtcagttgcctgatggtacagaaaacactataaaggcagtgaagattagaaagacttcatggaaggtctttttcctgtgaatgatgacgggcattttcagtggttcccttttgtggaagaaaatgttaaatgtaagtagccccaggaaggcttagcatgtgtgttatttatttatctatctatttatttatttatttatttatttatttatttatttatttatttatttgaagttgataaccctagcaagtacacataccttattaatggtagagacagaattatagatatacagacagggcagtttacaaagacagtacaggaaggcatagctatactccaccttttcccttgagtatattcaattggtgaggtatgtctagaagtccatctgtgttgttattattggtgagattaccaactaagacaccactggaagcccaataatcataatatctgggaaggactaaaaccttccatgtgcaacatatattctagaataaatatgcttgctacccacatcccaacgtctactccacaaagcctcagctgtggtcacctgttgcttctgaaacttttctttttttttttttttactttttatgtgtgttttatttttttcnnnnnnnnnnnnnnnnnnnnnnnnnnnnnnnnnnnnnnnnnnnnnnnnnnnnnnnnnnnnnnnnnnnnnnnnnnnnnnnnnnnnnnnnnnnnnnnnnnnnnnnnnnnnnnnnnnnnnnnnnnnnnnnnnnnnnnnnnnnnnnnnnnnnnnnnnnnnnnnnnnnnnnnnnnnnnnnnnnnnnnnnnnnnnnnnnnnnnnnnnnnnnnnnnnnnnnnnnnnnnnnnnnnnnnnnnnnnnnnnnnnnnnnnnnnnnnnnnnnnnnnnnnnnnnnnnnnnnnnnnnnnnnnnnnnnnnnnnnnnnnnnnnnnnnnnnnnnnnnnnnnnnnnnnnnnnnnnnnnnnnnnnnnnnnnnnnnnnnnnnnnnnnnnnnnnnnnnnnnnnnnnnnnnnnnnnnnnnnnnnnnnnnnnnnnnnnnnnnnnnnnnnnnnnnnnnnnnnnnnnnnnnnnnnnnnggcatagtgtccacacttcagtcttcattcttcttgagtttcatgtgtttagcaaattgtatcttatatcttgggtatcctaggtttggggctaatatccacttatcagtgagtacatattgtgtgagtttctttgtgaatgtgttacctcactcaggcatgatgccctccaggtccatccatttggctaggaatttcataaattcattctttttaatagctgagtagtactccattgtgtagatgtaccacattttctgtatccattcctctgttgaggggcatctgggttctttccagcttctggctattataaataaggctactatgaagatagtggagcatgtgtccttcttaccagttggggcatcttctggatatatgcccaggagaggtattgctggatcctccggtagtactatgtccaattttctgagtaatcaccagaatgatttccagagtggttgtaccagcctgcaatcccaccaacaatggaggagtgttcctctttctccacatccacgccagcatctgctgtcacctgaatttttgatcttagccattctgactggtgtgaggtggaatctcagggttgttttgatttgcatttccctgatgattaaggatgttgaacattttttcaggtgcttctctgccattccgtattcctcaggtgagaattctttgttcagttctgagccccattttttaatggggttatttgattttctgaagtccaccttattgagttctttatatatgttggatattagtcccctatctgatttaggataggtaaagatcctttctcaatctgttggtggtctttttgtcttactgacggtgtcttttgccttgcagaaactttcgagtttcattaggtcccatttgtcaattctcgatcttacagtacaagccattgctgttctgttcaggaatttttcccctgtgcccatatcttcaaggcttttccccactttctcctctataagtttcagtgtctctggttttatgtgaagttccttgatccacttagatttgaccttagtacaaggagataagtatggatcgattcacattcttctacacgataccaaccagttgtgccagcaccaattattgaaaatgctgtctttcttccactggatggatttagctcccttctcgaagatcaagtgaccataggtgtgtgggttcatttctgggtcttcaattctattccattggtctacttgtctgtctctataccagtaccatgcagtttttatcacaattgctctgtagtaaagctttaggtcaggcatggtgattccaccagaggttcttttatccttgagaagactttttgctatcctaggttttttgttattccagatgaatttgcaaattgctccttctaattggttgaagaattgagttggaattttgatggggattgcattgaatctgtagattgcttttggcaagatagccattttacaatgttgatcnnnnnnnnnnnnnnnnnnnnnnnnnnnnnnnnnnnnnnnnnnnnnnnnnnnnnnnnnnnnnnnnnnnnnnnnnnnnnnnnnnnnnnnnnnnnnnnnnnnnnnnnnnnnnnnnnnnnnnnnnnnnnnnnnnnnnnnnnnnnnnnnnnnnnnnnnnnnnnnnnnnnnnnnnnnnnnnnnnnnnnnnnnnnnnnnnnnnnnnnnnnnnnnnnnnnnnnnnnnnnnnnnnnnnnnnnnnnnnnnnnnnnnnnnnnnnnnnnnnnnnnnnnnnnnnnnnnnnnnnnnnnnnnnnnnnnnnnnnnnnnnnnnnnnnnnnnnnnnnnnnnnnnnnnnnnnnnnnnnnnnnnnnnnnnnnnnnnnnnnnnnnnnnnnnnnnnnnnnnnnnnnnnnnnnnnnnnnnnnnnnnnnnnnnnnnnnnnnnnnnnnnnnnnnnnnnnnnnnnnnnnnnnnnnnnnnnnnnnnnnnnnnnnnnnnnnnnnnnnnnnnnnnnnnnnnnnnnnnnnnnnnnnnnnnnnnnnnnnnnnnnnnnnnnnnnnnnnnnnnnnnnnnnnnnnnnnnnnnnnnnnnnnnnnnnnnnnnnnnnnnnnnnnnnnnnnnnnnnnnnnnnnnnnnnnnnnnnnnnnnnnnnnnnnnnnnnnnnnnnnnnnnnnnnnnnnnnnnnnnnnnnnnnnnnnnnnnnnnnnnnnnnnnnnnnnnnnnnnnnnnnnnnnnnnnnnnnnnnnnnnnnnnnnnnnnnnnnnnnnnnnnnnnnnnnnnnnnnnnnnnnnnnnnnnnnnnnnnnnnnnnnnnnnnnnnnnnnnnnnnnnnnnnnnnnnnnnnnnnnnnnnnnnnnnnnnnnnnnnnnnnnnnnnnnnnnnnnnnnnnnnnnnnnnnnnnnnnnnnnnnnnnnnnnnnnnnnnnnnnnnnnnnnnnnnnnnnnnnnnnnnnnnnnnnnnnnnnnnnnnnnnnnnnnnnnnnnnnnnnnnnnnnnnnnnnnnnnnnnnnnnnnnnnnnnnnnnnnnnnnnnnnnnnnnnnnnnnnnnnnnnnnnnnnnnnnnnnnnnnnnnnnnnnnnnnnnnnnnnnnnnnnnnnnnnnnnnnnnnnnnnnnnnnnnnnnnnnnnnnnnnnnnnnnnnnnnnnnnnnnnnnnnnnnnnnnnnnnnnnnnnnnnnnnnnnnnnnnnnnnnnnnnnnnnnnnnnnnnnnnnnnnnnnnnnnnnnnnnnnnnnnnnnnnnnnnnnnnnnnnnnnnnnnnnnnnnnnnnnnnnnnnnnnnnnnnnnnnnnnnnnnnnnnnnnnnnnnnnnnnnnnnnnnnnnnnnnnnnnnnnnnnnnnnnnnnnnnnnnnnnnnnnnnnnnnnnnnnnnnnnnnnnnnnnnnnnnnnnnnnnnnnnnnnnnnnnnnnnnnnnnnnnnnnnnnnnnnnnnnnnnnnnnnnnnnnnnnnnnnnnnnnnnnnnnnnnnnnnnnnnnnnnnnnnnnnnnnnnnnnnnnnnnnnnnnnnnnnnnnnnnnnnnnnnnnnnnnnnnnnnnnnnnnnnnnnnnnnnnnnnnnnnnnnnnnnnnnnnnnnnnnnnnnnnnnnnnnnnnnnnnnnnnnnnnnnnnnnnnnnnnnnnnnnnnnnnnnnnnnnnnnnnnnnnnnnnnnnnnnnnnnnnnnnnnnnnnnnnnnnnnnnnnnnnnnnnnnnnnnnnnnnnnnnnnnnnnnnnnnnnnnnnnnnnnnnnnnnnnnnnnnnnnnnnnnnnnnnnnnnnnnnnnnnnnnnnnnnnnnnnnnnnnnnnnnnnnnnnnnnnnnnnnnnnnnnnnnnnnnnnnnnnnnnnnnnnnnnnnnnnnnnnnnnnnnnnnnnnnnnnnnnnnnnnnnnnnnnnnnnnnnnnnnnnnnnnnnnnnnnnnnnnnnnnnnnnnnnnnnnnnnnnnnnnnnnnnnnnnnnnnnnnnnnnnnnnnnnnnnnnnnnnnnnnnnnnnnnnnnnnnnnnnnnnnnnnnnnnnnnnnnnnnnnnnnnnnnnnnnnnnnnnnnnnnnnnnnnnnnnnnnnnnnnnnnnnnnnnnnnnnnnnnnnnnnnnnnnnnnnnnnnnnnnnnnnnnnnnnnnnnnnnnnnnnnnnnnnnnnnnnnnnnnnnnnnnnnnnnnnnnnnnnnnnnnnnnnnnnnnnnnnnnnnnnnnnnnnnnnnnnnnnnnnnnnnnnnnnnnnnnnnnnnnnnnnnnnnnnnnnnnnnnnnnnnnnnnnnnnnnnnnnnnnnnnnnnnnnnnnnnnnnnnnnnnnnnnnnnnnnnnnnnnnnnnnnnnnnnnnnnnnnnnnnnnnnnnnnnnnnnnnnnnnnnnnnnnnnnnnnnnnnnnnnnnnnnnnnnnnnnnnnnnnnnnnnnnnnnnnnnnnnnnnnnnnnnnnnnnnnnnnnnnnnnnnnnnnnnnnnnnnnnnnnnnnnnnnnnnnnnnnnnnnnnnnnnnnnnnnnnnnnnnnnnnnnnnnnnnnnnnnnnnnnnnnnnnnnnnnnnnnnnnnnnnnnnnnnnnnnnnnnnnnnnnnnnnnnnnnnnnnnnnnnnnnnnnnnnnnnnnnnnnnnnnnnnnnnnnnnnnnnnnnnnnnnnnnnnnnnnnnnnnnnnnnnnnnnnnnnnnnnnnnnnnnnnnnnnnnnnnnnnnnnnnnnnnnnnnnnnnnnnnnnnnnnnnnnnnnnnnnnnnnnnnnnnnnnnnnnnnnnnnnnnnnnnnnnnnnnnnnnnnnnnnnnnnnnnnnnnnnnnnnnnnnnnnnnnnnnnnnnnnnnnnnnnnnnnnnnnnnnnnnnnnnnnnnnnnnnnnnnnnnnnnnnnnnnnnnnnnnnnnnnnnnnnnnnnnnnnnnnnnnnnnnnnnnnnnnnnnnnnnnnnnnnnnnnnnnnnnnnnnnnnnnnnnnnnnnnnnnnnnnnnnnnnnnnnnnnnnnnnnnnnnnnnnnnnnnnnnnnnnnnnnnnnnnnnnnnnnnnnnnnnnnnnnnnnnnnnnnnnnnnnnnnnnnnnnnnnnnnnnnnnnnnnnnnnnnnnnnnnnnnnnnnnnnnnnnnnnnnnnnnnnnnnnnnnnnnnnnnnnnnnnnnnnnnnnnnnnnnnnnnnnnnnnnnnnnnnnnnnnnnnnnnnnnnnnnnnnnnnnnnnnnnnnnnnnnnnnnnnnnnnnnnnnnnnnnnnnnnnnnnnnnnnnnnnnnnnnnnnnnnnnnnnnnnnnnnnnnnnnnnnnnnnnnnnnnnnnnnnnnnnnnnnnnnnnnnnnnnnnnnnnnnnnnnnnnnnnnnnnnnnnnnnnnnnnnnnnnnnnnnnnnnnnnnnnnnnnnnnnnnnnnnnnnnnnnnnnnnnnnnnnnnnnnnnnnnnnnnnnnnnnnnnnnnnnnnnnnnnnnnnnnnnnnnnnnnnnnnnnnnnnnnnnnnnnnnnnnnnnnnnnnnnnnnnnnnnnnnnnnnnnnnnnnnnnnnnnnnnnnnnnnnnnnnnnnnnnnnnnnnnnnnnnnnnnnnnnnnnnnnnnnnnnnnnnnnnnnnnnnnnnnnnnnnnnnnnnnnnnnnnnnnnnnnnnnnnnnnnnnnnnnnnnnnnnnnnnnnnnnnnnnnnnnnngccctggcgttcccctgtactggggcgtataaagtttgcgtgtccaatgggcctctctttccaatgatggccgactaggccatcttttgatacatatgcagttagagtcaagagctccggggtactggttagttcataatgttgttccacctatagggttgcagatccctttagctccttgggtactttctctaaacactcttgatagaaggaagagtttctttcttcaggaaggataaactctggtgtcctgtgaggaaaagcttggctctgagcttgttcttgggaaagtgtagattcttgcccttcctgcctgtttccccatcaatttatgcagaaactggagttgcttttttttttttccctgggatttgaattttttgagagaacccttcagtcacggatgtttgcagctaagctaggtgatgaaaggcccagtgtacaatgtagtatgtgttgtggaatctggtgaatgtgcaatgaatcaagtggattacaaggggttctttgcagagctggcgagggctagtgttagggtacaagggatttggatgcactgggattatctttgtgttcatatgataataattacttgttagagtggcctaatcaagtccctgcctgatatcagcagctgctttattcagtgtatattgtagttccctagttataacctgaaacagattcccttctacagttgctgaatgtagctcttctatttcagttgtttattgtgccctattctttcaccttgtatcatgactgttcgggatgggctccaccttgacttgcctgatgcacacagcctgcttcgcttctcttgttttctttaccaccttcttcctgaggatcatggtttatgcttcattgcacaatcatatttttggtaatcctctaagtttcctacactttgttttttccttttcccatatctgtctgggaaatcctaaacataatacatacaagtatgtgtttattctaaggctaggttactaaaatgtagaggaaggtgcttgatactaaggtctggttccataattgattcttgacttggtcaataaaggaggctggagacatttgctgggttgaagggataggtgggacttctgggtcccaggaggaaaagtagatgcagggaaagagaagggctttttaaaaccaggttttggaatgagaagcacgcagctatcatgtaagatcttgggggaagctagagtcagtggcctctgccaagggtgtatgctcaaggaggttgagcacggaggcggtgtagctgatacaggtgagctgataggtttagagaaggagaatctgtgcccgacaattgtgctagtaggcaagttctaaagtaataaagctgtctgagtgtttttcatctgtggagccaaggtgggtagagagaagctggctggtgatagcagcttagtggagctaagccagaggaacaaaaggaagctgggaggccagagcaagggcagcagcagcagcagtcatgggcaaaggcaatagcgtgtttttttggggggttttgttgtttttgttttgttttgttttgttttttgttactcacaacactgcaacttgacaaggaatcacttatctggtgtcttaatacctccgatttcaaatgtgtttctttcagtgctctgctctctcattgtgtgtaacaaactggaattctctctcatcatcttgtctcatgttcccctaaacaagctccatatcactcctactgcatgagaaataggagcatcagggaacctggatggtgggtgcctctcatccagcccataggagaagcgtgcctacatccgtgtctctgccagattttctgaggcggcttgcatatgtttaccttacatctctcagtgctaattcatccttgaatgactccatgctgcattcttgagccgttagagaagttctttctgagaatataaaacatcacccctgaggaatttgttggtccttaccctactctgcttcttgctaaatagtttcatctatgtgatttattcagttatacattataagcaaatgactgccaagattttatctatagttcagattataatctgattcctacttgtaaaatttgctctgggaaatctcacaaggttttcatatcagtgtcgcctgtggcatcttccttttggttagtctgccacttacaaccaccacaccctgtctatcatcaatcccattagcttacccctctttattaatcccattcccttctgtctctactcacacagcccttagtatatgtctacactttctctgtcatgatcatcacagcagcctcttactcagcttcctcagttcaaatcttatcctctagcagtggctatattgaagaaagagaggtctttctgaaattcaggcgtgaccagtcaagtccttttagtgacttcccattagcttcatggtacataatgtatttcctgtggccttcaacttcctctctttcctcttctgcagcctcactgatgcttctctctctcttcttatggttcattgcctcttcccacgataggcccatgtgcacatgcattctgtcttccattaccaacctactgcttccaactctatttaatgcatgcatataaattcttagttttcagcgtacagagcacttttctaagggacattttctgccttctcttcctttgacccaaactacattagaagtatgtattgtaagatctcatcttggcctgtatgcttccattctagagtctgtcactgtctggcattaattttatcaatgattagtggatgtgtgctactttattagaatgtaagtcctttgtgatggatcatttgttatgttttttacccatcattcccagtgaaacatatagtgtattatgtcagtaagcatttgttagatgggtgaattaatgcaccttaacaaacttaattattataaaaaaattaaatgtaagtgctaatcatttatattttatagaagttaaagccaagccttcaaaattatgtaacatgcttgatattgcacatgttaagtaaaatagacttagcatttaattatctagtttaatatattggtttctggagataagaatagatctttgtggaaataattattaataaatccctgcagtgggtttgctactcaccccaaatggtttatgctcccaaatgaaacacacacatacacacacacacacacacacacacacacacacacacgcacacacatacacacacaccctttatattttaaatgtgtcttaaacagcaccatagtggggccacttccactgctgttagaatttatctcccaccaataatttcgacttactacttattaattcttctgctctatcttggctgctctgggtccacttgttctcctgattccttcacatggtggctgtatttattttgcactcttctttgatatggtgtctctcctcttttcatactctcccagtgcttgctctctctctctctctctctctctctctctctctctctctctctctctctctctccctttcctcctggtttccagctaggaaatcctaacatttcacctctgtctgtcctccccaggtattggctgttgacatctttatttaccaacaagaaccaactgtggcaggtttccagaagcaatgtataggcactctcgtgcaagcaagttttgggggaactgaattagcattcataatacaagtagctacagattctaaagaatttaattatattaggcattttgttacagttttactgtaaattaaatttaaaaatttatatcagttatattaatgcttattttaaaactaaaagactaaaataaaaatgccctatagtttgaacaaactgagaatgtttaattaaactttgagtatatattttggttattaaagtgatgacatttcattattcttgggagcggtattaacattaaaaagaagactagcaatataatgaaatattaattatgtaaaggtgtatatgagagaagaaagagttctgtgaacttatttctttggggtatagtattgtcagtaattcatttattcctgtcatattctctccctgctcagttttctgtggtgctaattcatttttcagaaatgttctttttaagatatatttatttcatgaacagtttgaactgttaatagggaatcgttattatgataactaatattttacctgtcttataatttgtgttctaatcatgttatgcgctgttggcttaaaggctgctaaattctgactttcttataagtgatcacaacgttccaataatgtcttaaaatttctcttatattggtaatgtttcattacatggtggaggttgaaggaaataaaaagcagttcttcattcattaaaaaggaagtttattaaaatgaaatgacatccctccaaaatttattgaacagatcactgatccaaattctgataaaaatttgttgtattatgcttgacagtaaatggttacctcacttcccatttgccacctcagcaaaaaagaaatacataaaataacagagatttggtattccttcatagttagcaatggttcactaaaaaacctgatctcaaaacctttgcagctgaccggtaagtcagttcagactcccttcctgccatttgagtaacaccaagagttatccttatcactgtcaactgaaataaaaagaacaaggattgatgctggtgggtgatgaaaatagaacaaggagggcacatggacagtgagcaagacagagagatgggagatgaagaacaacaaaaacagtaggtaaggcagggacctgagaaagtggcagtatcagttagatatagtgatagggtaacacagtggcaaaggattggcaatgtggtatgaacaagaataggtagggtgcattttgttagaaatggagggaaggaagcaaaattcatgttgtgttgtgtggtgaggtgtttaggatattttcagtggaggcagaagaaacagattagtgaaagagaagaagagactaaagatcactgcaaaggaagtgctccaaggtagcacagaggtcatcaaggaggaggcaaaggttgccagattagagggttgtagtccctttcaagagtgcccagtgaaggaaaagtgggtgaggttgcagagcaaagcttacttatgaagaaagaaactcaagaagcttgctgaaaagagctgattgggcaactggagaacagagcttggttctccaactacactaaggtcacatgtgtggaagagtcaccatgcctcctgtctgcaagcacaatatggcattgttaatcgtgtcagggttatctattcttaatttttgtaaataattgtactatttcctgtccaaagttctacagggaaaaaactaagaaaacacaaaactttgaaatgtcaaaaattattctacagtacaatgaatgaagaattttgtgttatgaaacataagcctagcattttcttaaattttttcacacttttgcaatgctttagaaatcattggaaaaggtgggaaggagcttgaaagtcttaaatgaaaaaaatgcactaataagagaaaagttatgtattagattactattgaattgatgaatagtagcctttaaacattttaagcattcaatatacaattattagaaattgaaccttttttctggtcttgcccatgtacagacatactctaacatgtctatttgttgtttctttttaaggcttttaaaaccaaggatggctatcttgtaattggagcaggaaataaccaacagtttgctgtggtatgcaaggtaatccataatcaccatgtactggctagttttgtgtcaacttgacacagctggagttatcacagagaaaggagcttcaattgaggaaatgcctccatgagatccagctgtaaggcattttctcaattagtgatcaagagggaaaggccccttgtgggtgggaccatttctgggctggtagtcttgggttctataagagagcaggctgagcaagccaggagaagcaagccagtaaagaacatccctccatggcctctgcatcagctcctgctttctgacctgcttgagttccagtcctgacttccttgatgatgaacagcagtatggaagtgtaagctgaataaaccctttcctccccaacttgcttcttggtcatgatgtttgtgcaggaatagaaaccccgactaagacaaattggtaccagcagagtggggtattcctgtgaaacctggccatgttttggggaggactgtggaaggattttggaactttgggctagaagatccattcggtgttaagagctttgtcagatgagtaggagcttggaagataatgttgagaacagtgcagaagatggaggtctggtttgtgaaatttcagagggaaaattaaagactcttttcagggccattgttactttggttgtgaaggttctgtggttctggctagctggggctgaagaatcagctgtgattaacaagataccagaactactaaagcaaaaactttgcattactggaactattgatgctggttagctggagctaagaaattagcggtgattaagaagagatcagcatcgttgaggtgacatcttctgggaagtgttttctgaaagcacaaagaggctgtgttccagagatagccaaggttgtactcctgctgcagcgggacttggtaatgtgtaagggtcacccagatggtactggttttgaaggtatgaaggggtcatgcagagcagctgaggctcggcaatgtgagaggccatggaaggccattggtgaaggtacagcctcagttgcaattgatggcccaggactgaaggggtcatgcagtgttttggagatgccagtatcatgagatgaccaccaagagcagcagcagtggagtataggcatctggagtctagaggatgacgtgtgtgctacaaaaggcatggctggagaagtgacccaagcccttggaggaggaccagaagatcgtgagttggatcccagacattggacagttggagattgattttgattttgattgtgactatgacctgatattttccctcttgaaggaagaaactatttagtggagcccacagttaagagacttttcattgtaaaaagactttggattttaaaagagatggatattttaaagagattgaaattttaagaatatgtaaaaactgtgggacgtttaaagttatttagatcttggggatgaataagaatgtaagggttgaggcttactagtgatgtgtttgtgtgttaagttgacaaggggtcaattgtcctagctagttttgtgtcaacttgacacagctggagttatcacagagaaagaagcttcagttgaggaaatgcctctgtgagatccaactgtaaggcatttcctcaattagtgatcaagggggaaaggccccttgtgggtgggaccatttctgggctggtagtcttgggttctataagagagtaagctgagcaagccaggagaagcaagccagtaaagaacatccctccatggcctctgcatcagctcctgctttctgacctgcttgagttccagtcctgacttccttggtgatgaacagcagtatggaagtgtaacctgaataaaccctttcctccccaacttgtttcttggtcatgatgtttgtacaggagtagaaacactaagacacaccagaatggatagatggtaggttctcctgttcattttgtacaaactgagggaaagttcaattttgcctgacagtattgctcagtcatagctagttgagtacccatgtttgcacctgaaatcacaccacttgatactcacaactggtgagacataggtctggtaaacattgtcctttctttcttttcttttttttttattacttcctttcttacttctttgttctttctatctctgtttccttctttctttcctttcttccttcctttcttcttttcgttcttccttgcattttgtatgcttatgtatttgtgtaccctaaggtatgcatgtgaaggtatcttttcttcttgtaggttctagagaacttgttatttgcttgtttatgttggtgttggtagtgtagtacctaggttgaaatgagaaactatgacttataattttctcaattaaattttaaaattttaattaatgtatcattgtctccttctcttttctccctccagcccttttcatgttgccttctctgattgtctcacatggatgtcatctcttgctttgatttattaaggttacatttatatatacatttacatacatgcatacatacataaacacttttttcaattttgggggcatttttagtcctgtttctttctcttctccttccctatctccctctgtctctttcctctatatcatatttaattagctccaaatataaatgaagtatttgcaaattaatttttggtctgctagaaattttaggtttttttggttgtgtttgtttaatgcatagctttctgtggagttcatacttaaatattttagaaattagagttatattaaaaatgtttcttctcaataaaacccaagaaagccttaaatacttgaacccatttaggataggaatatgctaaactttaagtattggctagacagtttttaatattttcactttttatttcaactttacacctgttttaagacccttttaaaaataaaatactgaagtttgaaatttttaaagtgtcatttcactttcactagtttaaatccaagagatataagctaattaaaatatgtttgttttacccttattttattttttttgcctatagacaagggtttcatctattgaaaagatttttcctgtctgagagagtagatttttaccaactatgtgaccataggccttctgtcttattaaaagattcctgaatttctcaggggaattattttcattatagcagttaacctattatatacaagaattatttattatggtgcctcttttgtgtgagaagttaacaagcagagctaaaacccacagcaaagaggtggaaaagactgcagagaaggtgacagacaagagggatggttatgaatgcagggagcactgctgaggctaaggtaggagggagggggaagcctctataatggtgacccagagagtgtagagagaattgattcaaacatttgatcttggatcaaagaatctttattatgaatggtcagctttaaaaatatgaaacatacggaagccgttgacggtgaagtcattcctgtgctcaacttcagagatggaaactttgactctgtactctaaacaagtataggtttgcctactgagccaaatgtttacagtccctctctctctctctctctctctctctctctctctctctctctctctctctctcaagttgatgcattcaaatttgttcttttttgattcattactgctgatcattttgaaatgtttaagctttttcataagtatctgtaagaccacttttgggaaagacttttattttaaagcagaaggtttgctgcacattttatactaaaatatgacttaccgctataatatgctttcacattgcttcaaaagggagactgtcataggccccaatataacggcatagttgactttgcttttcccatatgtgagttaggaatgataatccctgctatgagccatcaaggcagtgcctttaaaacctccaggacctcagaggaagtgttctgtgcggagggtttccatggtatttagtttatttgtaggtttgccaagtgagcactgcactttgattgactttctcaatcttggtcatttcgtcatcgcatgtaaacttgtacaacatttcttttaatccacgttaaaacaaattgttggtatgtttacttggatacaaaattctcttttcttaccagcagtacataaggaataaatttcttgtaatatatatttcattcacacttatctgttagggatggtctcacgcaaactggcctcacagaagtgaacccaagtctgcttctttagaagatttccgaacaactccacctcgtaggaagggcaggagcagctgtcagtgaggactggctgcgatttacttaagtcctctctttctaacctagaagttgatatactggttgattaacaggaggcacactataaggaagtgcttgtgttcaggggtcagagtcagagcacaaatttaagggttgggggtctgaaatatactgctatatataaagtgaaccttggtgtatgacaatttctattttatgtcccttaacatgatgcagaataacagggaaagtgagcatatgtaagctattttaaactgattgatgccaacatttatggctatttctatttgaagtatattgacatcccctttaaagtcatttccttcactgggtacagaatgtgttgcttttcagcttcaatatatttagaatctctgatagtcacgttctcaaagatttgaccggtgtgtttggggtcgggcactggaaatttcaactttaataaatattatacttgattcaggtgcaggtggtctggggacattacagcctgatttctaagggctttgtctgcttatagtcaggtaaccatggataaagtacttaatcttttctacacatttgtgtccctataaaatgtaggttatgatatatagctataccaatgtatagattacggggatcttaagggctagttacataagcaaaacatagcatgcccctcactcacaagaagcatttattaactggcgtctaaaagcgtggataggataattctggttctaggagagacccaggtggcacacttcccctttaacagagctttgtgataagacctggctaccatggagggggactttgcttgacgcctctgtgagcagacagcaggagcattaaagagtattagaatttgaagctcctgtgaactggcagattagttcaatggagcctgaagtggaacagcgggcaccaggcaagggaaatgagctccagaggtgtgctttattgctgtacaaggaaaattaagagtgagttgtggtctccatgtggtgctattcctttctaccctctacactttcttctgtgctagccacggaagaatcccagcagaacacagggcagagtccactaagaaagaaacttttctccatgggtcaggttatccacaggtgtgaatctgtgttgctgttgacctgtgttctggccatttggcttccggccgaaaagtatacactgaaattggagtaatcagagagaaagattgcaaagagggaaaaatttttcagagtgatccttgaacttatttatgaattctgggcttacatttgtgctgcatatacactgatctgattcaaattagtgcacccaaaacgctgtgagcagaatcaacatacatgccttcatgctcagcttacagtgtgattactaagtggagtacatacaagacagattcaaatgacactaaaaaggcttgaaaattgaaacaatattagatccaaaatgatggaaactgtgatgaaacttgcagcttagaacgaagcaaggcaacttctagaaacaatagcatcaacaagtttctacaggatttaaacatgacttagaagttctattattattaattattatttttacttttaaaaatattcactttacattctaaaccaccaatcaaaaaacaaacaaacaaacaacaacaaaaaaacaaaccacatggtggaacttgtggctctagctgtataggtagcagaggatggcctagtcagtcatcaatgggaggagaggctctaggtcctgtgaaggatctatgccccagtataggagagtgccagggccaggaatgggagtgggtgggttagggagcagggggaggggggcaggaataggagattttcggaggggaaaccaggaaaggggataacatttgaaatgcaaataaagaaaatatctaataaaaatatcaaaatcaaaaaaaaaagaaaaaaatattcactttacattctgatcactacccttcctcccacaatccctccccctatcccactccccttttcttctgagagagtggaggctcctccgactccagcacatcaagtctctgcatggctggatgcttcttctcccaataaagtcagacaacacagctgagttaggggaactggttccatagaaagacaacaactttagggatagacactgctctgcttgttctggacctacataaagactgagctgcacatctactacatgcctctgtgtttgtgtgtgtgtgtgtgtgtgtgtgtgtgtgtatgcacatgcttgcatgcatgggagaaggtgtctaggtccagctctttggttagtgtgtcagtttctgagagcctccaagggtctggattatttgattcttttggtctttctgtgggttcctatccccttaggggcccttaattctcccctccaactttttcataagagtttcataatgtttgcctgtgggcctctgcatctgtcttagtcagctgctgagtcctctcagaggacagccatgctaggctcctgtctgcaggcataacaagagtattattaatagtgtcagagattggtgcttgtccatgggatgtgttgctggttgggttggttattgttccatcagtctctgctctatcccctgtccctgcatttcttgtaggcaggataaattttgggccttcttgactaagttggtgtccctattgttccacttaggttcctgcctggctacagaagtggcctcttaagattatatatccccagagctatgagactcagctaggattgcctccattgattcttgggagcctccctcatccctgatctctggcacatattcgagatgcctttaatatctttgtgtctgtggagtgtggcatgtgtatcctatattttatggttagcatccttttataagtaagtcctttggggtctgggttacctcactcagttttatccacttgcctgcaaattcatgatgtctttgtttttaaaagctgaatagtattccattgtgtagatgtactacattttctatatccattcttcagttgaggggaatctaggttgtttctggtgattatgaataaaactgcaatgaatattgtttaacaagtgtccctgtgatatagtgcggcttcttttgcttatacacccaggagtggtattgctgggtcttgaggtagaactatttacagttttctgagaaactgccaaattgatctccaaagtggttgtacaagtttgtattcctaccatcaatggaggagtatccccctattccaaatccttgccagcatgtactttcatttgagtttttgatcttagccattctgataggtgtaaaatggaacctcagagttgttttgatttacatgtccctgaggagtaaggactttgaacattttgaaagtgcttctctccatttaagattcctctgttgagaaatctgtttagctatataccccatttttcaattgggttatttgggttgttgatgtctaacttcttgagctctttataaaattttgtatattagccttctctcagatgtaggtttggtgaatatacttccaccatctgtaggctgtgttttgtcctaacgacagtgtcctttgcattacagaaattttgccatttcatgaggtcccatttatcagttgttgatcttagagcccgagctattggtgttctgttcaggaaattgtcttttgtaccaatgcattcaaggatattccctactttctgttctattagaatggctactctaccttgcttcttgggtctgtttgcttggaaaacctttttccatccctttactctgcagtaatgtctatctttattgctgaggtgtgttacatgtgtgcagtagaattatggctcctgattttgcatccattctgttagcctgtgtctttttcttgaggaattgagtcccttgatgttgagagatagtaatgacaaatgattgttactttctgttatcttgatgttggtggtgttagtgtgtgtgtgttttccttgtttggtatggatttacttatttcctgtgcttttttgaatgtagtttatccttcttgggttggagtcttccttgtagtattttatgtaggactggatttgtggagagatattgtttaaatttgaatttgtcttgaaatatcttattttctctccatctatggttttgtagaggttgcaggatatctttccaggcacttctagcttttaaagtctctcttaagaagtctggtgtaattttgataggtctgcctttgtatgttacgtggcctttttccctcactgctttttaatattctttcattgctctgtagattttgtgttttgattattatgtcccagaaggattttcttttcaggtccagtctaagtggttctctatatctcatatgtttataggcatctttttctataggttaagaaagttttcttctatgattttgttgaaatattttctggtctttggagctgggatacttcaccttcttccattcctgttattcttaggttaggctttttaatggtatcccagatttcctggatgttttcagttgggaattttttagatttgacattctctttgattgatgtaccaacttaatctattgtattttatacacctgaaattctctattccatctcctgtattctgttgttcctgttctcttccctaggtttctatctctaggattccctcagtttgtgttttctttattgcttctgtttctacattcaggtcttgagcagttttatttatttccttcacctgtttgattgcattttcctttagtgctttaagggatttattcatcatctctttaaaggcctctgtcatctttataagattggatttaagatcattttcttgtgctccagttgtgttaggatacccagggcttgctgtagtagggtaactgtgctctgaaggtgtcatattgccctgatttttgttgattgttttcttttggatacctttagcccttggatgttccttttgtagtagggagcctaacctcagtgatctggatgtggcagacctctttaggatatccttaggctgtatggtttcaggtcagcaggtctgatgaaggtgggctgagaggttctgagagaatgatgggttccagtgaggatggcaggaaactcagggcagctggaagtgccctggatggctagggtggacagagaagataggtatggggaaggagtctaacctgtatgcatctggatctgcaggtctgatccagaagttctattttattatttttatttatgtgtagtttcttgtctgtaagtgcactatgtgtatgaaggtgcccgaggaggccagaagagggcatcaaatctcaatgaattggacttaagagtggttgtgagccttttgatgctagtactgggaaccaaacccaggccttctacagagtagcaagtattcttaacccctgaactatttctctaggcccaattcaaaagttcttggtacctatcccgtcccacgggattcagttatttgtgggtgcgaggggggaccgcatacctggaaggagatgggaggaagaaaaagagaaataggagatcaggaagggtacctatcgaggtctcgtttattatgctgaggtgccttgtttttaaagcatacatcgcggggaatatgggaggagtcgagggagaattatacaaagaacaaagaagtgggcatctgctgacatgggggccctttgcatcttatctctggaacatcgatcctccttgacagccttgggtgtcaggctgggctccggtgtgactcatgtccttggatgtcatgggaactcaggaagagatagggaagagggggctattattcaaattttacagccttgggtgtcaggaagggaataaggaggaagggggtgataaccagctcttagcacgaggccatttgacctgttagggagattgtgaagggcttactttctcacggatggtctctgacaggtaccatgtttaaaatgtctgggatactatctaaaattattcagaaaatgaagaatctaaagtttctcaagaaaagacagaaagttgtttatgccaacatcagcacaacacatgtccaaattaattcacaaagactgtaatacactgttcttaaaattctcttctaagcattataggcatcccgagtaaatggaaaagtaaaagtgtttagcaaagccattaaagatatgaataatcaaatggaaaatttggagtcagaaatgtatgatgataacccgtattggggtggacttttcagtgaagcagctgatttttttttgtttgttttgttttttggtgtcttttttgttttgttttgtttttttgttttgttttgttttgttttgtttttgttactcatgcttcctataagtagctgcccacctcttcttctgtaggcccactagtccacagactggttttagaggaatcattactttggtctcttgtctgtattctgtgtgggcttgttcacttcttcctgagaaaaatcacacaacagagttgctgtctgaatagagaccttcaaaatcaaaactaagttggggaggagtggttacacactccctgcaatggataatagggtatgcaaccaaagtaaaaccatcttagagtgtagtatcactgtctagccaccatcttctgcttggttttggttggcatggcattttatacatgggatctagaactttagttactgtggaggtgttccctaaaccactaatagacttctagctatgttacagtctctgaaagtagttcataaaggacatgatgctcatgagcaggatgtaactcgatttgcatgactttactgtgggtggtaaggcatacaactaaggctcagctaatttcccagaaagaatgtttctgtgtaagtcaggagttacagtgcgggaaacacatacagacattctcacccacgtcaacctctggtttgttgggtaaagcaagacaaagggggagggggatgagagcagtggttctccatcttcctaatgctgtgatccttcaatacagttcttcatgctgtggtgatcagaaaattagttttctctctacttcataactataattttgctactgttattaatcatagtataaatatctatgttttgtgatggtcttaggcagcccctgtgaaagggtcatttaactccaaagggtagtgacccataggttgagaacttctgggatagagttactggcataatttttttttttttttttacaagcaaaggggtttaaattgtatctgtgctaaggaacatttcatagaatgcaaaaaattgtaacctgtaacctgtggaaagaattggtcactgaataggaaagaaataagacagaagttgtggaagatgcctctgatgtctgatctttaacagagagggcagggacatctgtgattcggcatgagaatggagactttcagaatggtcaagtatcagaaaccatgttcattgtgggacattcaacatctgagctgcttaaattaggaacaacatttactactttattagtagtactggcattagtattattagtattagttatattattatttattagggtttttttttttgaggtatgatttcttcttgtagccctgactttcttggaacttactctataaatcaggctggcctcaaactcagagatctacctgtgcctgccttctgactgctgtgatttaaaacatgtgtcactaggcttaacaaagaacaactttttatctcacagcctagcttgtgatgctatgagacatggggttggatttgattattctgagtacagagaaattggagaaactgggcaatgtacctacctgtcccttcttaagacagagacaaactaaggaaatcaggttttgttggcctggcttgcaggaataagtagaggtatttggttatttctagctaagactcccacggagatcaaggactagaatacaatggagaaaagatgggtgttttccaagagactgaagcatgtgagagattgtgtttgatgtccagtgcactcatctgggtaagaccatgtgtgcaggagagctaaggaagaggttgatttggtagggacctcaaagctagcatggagctttagtgactttgccaaactccatggtgagatgtgattttgtgatttttatgaatttggagaggttttggtagatctaactgatttagacaagcatgtaaattgatttctaaagttataaaacaattaagaggggatgattaaaggcagaagacaggtcacttgaaggtaagtgtggcaaggtttgtgtccaacaagtgtttctaagggaaaaaattgacagaaaaccaagtgttatgccagtgaggttctagaaggcttgaagatctgaataacagttcacagaagacataaatgataaaacagctcaggtcaaaaagattaagcttgaccaagagctgaagaattggttttgagtatgtggcagtatatatctctccattatagtaaattatgttgtgggtagagactattcacccagcctagaccctttcaagtatgaccaatggtaaggcaagagccagtgtgggtccagagcctgtcagtgctgaggagccacttctaattgccagcttggcatgctaaaacgtgaccatgaccccaccaggtctaaagtaggctaaacacctcaagctctccccatcccaagaacatcaggagaggggagatatttaatagccctatagtagtagtagcagcactctaggatgagaaggctgtgtggttcataaaaaatgactgtgggctatggatggctagatgaggtagtatttttcacctatggcagccataatcagcattgcttttctaatgtttcttttatttgtttccttagtcaagaccacaaagcatttgaaatagatgccagtagacaatagaccttcagagaacacattaccctctttaaaatccaatgtataaaaagaataaagacatcattaagggcagaaaatactctcaagaacgagtggatgaatgataatcccaatgccagaggaaacttactactaattaattattgatgagggaggcccctaaggctaaacaaactgcaaaggttattactaccactattggttacatttaaagccaggtggcaagtccatgttgttgatgatattacatgtttttgctgcaggacaggaaacatcaggttgaaacaaagctggaagatttcacctgccttctggcattctttagtaccaggaagcactatataggatgctaagggagaactgttttcagtaatcctgttcagctatatacaccgtttagtaccattatgatgtgcctactgctgcagtaatgaccagactgttatggtctaatattttgctttctgattggaaagaaaagcctaaagccagtatttggaaaggtcactgctattatttgatagaaaaggtgtggtatgtctttcaaatagctagcccctgcaaacatttatacttaggttcatagattactataactggcaatagtcatgtatttagtcagacagctatattattctcttccagactcatggagaattgtagaagacagagcagaaagaatccaagagctagaggaagggatggaattttatgttgcagtttccttcatattgaaacattacctcctagagggaggagggaagcttttaagacttagagattgaaaaaaaatcatagaaggcacagaaagtgactaaaactacaagactcaagaaattaatgaaagatataagattcttcatgccatatcaacagtaactattgctgaggttcagagactctaaccagatgaactgcttgcatatcatctagggagtcttgggaatatagcccttatatgttgttagccatttttagggtaggctttttggcaatgcagaggccattgagtcatctgaggtcttataataagtctttatacgcttctgtaagaaactctagtgagcctactagttcatagctagacttctgtgtactcattttttgatgtgttgtgggtctcctatccaaggtgaataggcctttaaatcattgtttgcttgtgtttcatgtagtgctggttttgcatgctacaaatctaagatcctatgcaagctatatccactaggcaatagtagcaagattgttggttggatttgaagcctgctttataagggggaattcattcctggtactataaacatggctaaaactagttacgaggaaaggtgtagactcccaagagaaatcttttgatttgttttggtgagtggtcaagttgccaaaccactaccttctcaatatttatgtttatatccctaggtcagcatcagctttcagtcttgggcagagaagcttttgatcacattggttagtgattaatgcagaaactcccatcttttcaaagtgctaagagtgattgtggatgcttaaccgaagatgcggcatctatattcatcctcccacaaagcttagggaacaatacagaaggaaaagaaagaatgtaagtgccagagcatgggacagagtgctgggaaaggctgtctgcaggacatgccatagctgtaagactcataaatccacagcagctgtgcttaagtttgctcaacctgcacaaaatcaaacacattaattctggcataggaaagaggctctctagggcccatccctagctgaggagttattgctagtttgtagctactggggaggaggaggttacttttcttcacactgtggccactggaagggttgcctgttctgttttggaggatcccacacctggaggtgtaatagtaacactagttggactcagtatgttataagaaatcaagtttggagatagacagcagacaggattgaaggggaaattggagggagggacaggtgagttgatacatttaaaatgaattatatagatctgcaatattttcaatgagtactaaaactgtaaaaccaaattattggtgatgatcagattaaaagtaatttattcactgctgttaggagtgtaaattagtcaagcgacgagtttgtttttttttttttttttctctaagcaccacacataggctgtgcccattcttaatttcttacaaaatggtgactttttgtattatttcatgactgatttccttttaagatatcttaatcatattgcagagatcatatgtcccagtacagaggaatgccagggacaggaaacgggagtgggtgggttggggagcagggcagggggagagtatagggggctttgggggtagcatttgaaatgtaaatgaggaaaatatataataaaaatgccaaaaaaattttaaaatatatttttaattaggtattttcttcatttacatttcaaacgctatcccaaaagtcccccagaaccccccaccactcccctacccacccactcccacttcttgcccctggctttcccccgtactgaggcatataaagtttgcaagaccaaggggcctctcttcccaatgatggccaactaggccatcttctgatacatatgcagctagagacatgagcttcgggggtactggttaattgatattgttgttccacctacagggttgcaaacctctttagctccttgggtactttctctagctcctccattgggggccccgtgttccatccaatagctgactgtgagcatccacttctgtgtttgccaggccccagcatagccttacaagagacagctatatcagggtcctttcagaaaaatcttgctggtgtatgcaaatgtcagcgtttggagactgattatgggatggattaccaggtgtggcagtctccagatggtccatcctttcgtctcagctccaaactttatctctgtaactccttccatgggtgttttgtttccaattctaagaagggtcaaagtgtccacattttgatcttcattcttcttgagtttcatgtgttttgaaaattgtatcttgtatcttgggtattctaagtttctgggttaatatccacttatcagtgagtacataacatgtgagttcttttgtgattgggttacctcgctcaggatgatgccctccaggtccatccatttggctaggaatttcataaattcattctttttaatagctgagtagtacttcattatgtaaatgtaccacattttctgtatccattcctctgttgaggggcatctgggttctttccagcttctggctattataaataaggctactatgaacatagtagaacatgtgttcttattaccagttagaacattttctgggtatattcccaggaggggtgttgctggatcttccagtaatactatgtccagttttctgaggaacttccggactgatttccagagtgattgaacaagcttgtaattccaccagcaatgaaggaatgttcctctttctttacaatctcaccagcatctgctgtcacctgaatttttgatcttagccattctaactggtgttagtgaggtagaatctcagggttattttgatttgcatttccctgataattaaggatgctgaacattttttcaggtgcttctcaaccattcggtattcctcaggtgagaattctttgtttagtctgagcccaattttttaatggggttatttgattttctggagtccaccttcttgagttctttatatatattggatattagtcccctatctgatttaggattagtaaatttcccaatctgttggtggcctttttgtcttattgacagtgtcttttgccttccttacaagctttggaattttatgaggtcccatttgttgattcttgatcttacaacactagccattgctgttctattcaggaatttttcccctgtgcccatatcttcgaggcttttccccactttctcttctataagcttcagtgtctctggttttatgtggagttccttgatccacttagatttgaccttagtacaaggagataagaatggatcaattcctattcttctacatgataaccgcccaagttgtgcaagcaccatttgttgaaaatgctgtcttttttccactggatggttttttctcccttgtcaaagatcacatgaccataggtgtgtgggttcatttctgggtcttcaattctattccgttggtttacttgtctttgtctataccagtaccatgcagtttttatcacaattgctctgtagtaaagctttaggtcaggcatggtgattccaccagaggttcttttatccttgagaagagtttttgatatcctaggtttgttttgttattccagatgaatttgcaaatttccctttctaatttgttgaagaattgagttggaattttgaatgggattgcattgaatctgtagattgcttttgacaagatagctatttttactatattgatcctgccaatctatgaaaatgggagatctttccatcttctgagatcttctttaatttctttcttcagagacttgaagttcttatcatacagatctttcacttccttagagtcacaccaaggtattttatattatttgtgactattgtgaagggtgttttttccctaatttcattctcaggctgtttatcctttgtgtagagaaaggccattgacttgtttgagttaattttatatccagctacttcattgaagctgtttatcaggtttaggagttctcttttggaatttttagggtcacttatatatacactatcatatcatctgcaaaaagtgatatttttacttcttcctttccaatttgtgtccccttgatctccttttgttgtctaattgctctggctagaaattcaagtacaatgttgaataggtatggagaaagtgggcagccttgtctagtccctgattttagtgggattgcttccagcttctcaccattcactttgatgttggctactagtttgctgtaaattgcttttatcatgtttaggtatgggccttgaattcctgatcattccaagacttttatcatgaatgggtgttggattttgtcaaatgctttctctgcatctaatgagatgatcatgtggtttttgtctttgagtttgtttatatagtgattatgttgatggatttccatatataaaaccatccctgcatctctggaatgaaacctacttggtgaggatgcatgattgttttgatgtgttcttggatttggttagcgagaattttcttgagtatttttgcatcgatattcataagagaaattggtctgaagttctctatatttgttgggtctttctgtggtttaggtatcagagttattgcggtttcatagaattaattgggtagagtaccttctgcttctattttgtggaatagtttgtgaagaactggaattagatcttctttgaaggtctgatagaactctgcactaaacctgtctggtcctgggctttttttggttgggagacttttaatgactgcttctatttctttaggggatataggactgtttagatcattaatctgatcctgaattaactttggtatctggtttctgtctagaaatgtgtcccattcatccaggttctccagttttgttgagtatagccttttgtagaaggatctgatggtgttttggatttcttcaggatctgttgttatgtctccctttttatttctgattttgttaattaggatgctttccctgtgccctctagtgagtctggctaagggtttatctatcttgttgattttctcaaagaaccagctcctggtttggatgattctttgaatagttcttcttgtttccacttggttgattttacccctgagtttgattatttcctgctgtctacttctcttgggtgaatttgcttccttttgttctagagcttttaggtgtgttgtcaagctgctaatgtgtgctctctctagtttctttttggaggcactcagagctatgactttccctcttagaaatgctttctttttgtcccattagtttgggtatgttgtggcttcattttcattaaactctaaaaagtctttaatttctttctttattccttccttgaccaaggtatcattgagaagattgttgttaagtttccacgtgaatgttggctttctattatttatgttgttattgaagatcagccttagtccatggtgatctgataggatgcatgggacaatttcaataattttgtatctgttgaggcctgttttgtgaccaattatatggtcagttttggagaaggtcccatgaggtgctgagaagaaggtatatccttttgttttaggataaaatgttctgtagatatctgttaaatccatttgtttcataacttctgttagttccactgtgttcctgtttagtttttgtttccatggtctgtccattgatgaaagtagtgtgttgaagtcttccactattattgtgtgaggtgcaatgtgtgctttgagctttactaaagtttctttaatgaatgtggctgcccttgcatttggagcatcgatattcagaattgagagcatttgaaatgtaaatgaagaaaatatcctataaaaactgccaaaaaatttttaaaaaacaagattcttaatgggcattatttatttaagaagataattcatgactcaattctatgctctcaccaggaaactcacgtcaagaataatgactttggcaatgtgaaataagaggattgtgaaaggcatagaactaaagcagaggtatcataaacaaagctgatgtggactttcagggctgatgtatgaaagcaaaaaagttcagtaagtcaaatgcagaggacacattggcattcaagcccctcaaaaatacagtcaccttgtgtctttttgtttgtttgtttgtttaatgtagctggcagtaatatgctttatatctaggctgacttgaaaattcaaccagtttctttggggaggaatgtgcttgtttgtgaagacctactcttcagaaggaagtttgtgactaggtcaggatttgagaccaattttgggatcatgtgcaataactgggaggtttctagaaagaacactgtatgcagtgtcacttttcaaaatcctggagagtattactgcttttagagagagtaggtggtggatagaaaagaggaattgcactgctggggtggactcgaccctgggaaatcttctcttcttctctctcttttgtgagacaattagtggattgatttcatttaaatgatgggaattaagtgaaacaattaagtgtttatatcaaaagcaaacacattaatgaagtaagtaaggctttccatagggcacctggcttacccccagtccataaatgctccttctgactttccaacacaactgccaaactcttgtctccatacattctttcaaaatgtcttttcccttccaaatccacttggtactttcattatggtcttgttaaaactacaggatgtccaatggggtttgctggatggattttccctttagcaaggagcagccaaagaggaagtgcacaacagtatttctagtcagtgttccttcagggagacacactacagaaaaattgtgacactcctgaaagacgaagatgttttaatttgatgttgtttgaacagctagaatttggaaaaatacttgagctttccctttatgttagcaccttatacaatatcctgaatagcactcctggggtagataatatcattttattaacatgtggaacaactaggtctgtgcccttaagatatatgttggccgtaggttttatataaatgaatataggtactctcatataactgacaagagtaattcatcaatataattcctccaggtgtatattgctgcttccatccccttgtagagtggtatggtgacaaggaaagaatgggaaggcagatcctgactgctgtaggacctaagggtccaagaagatcttgtaaagtatacattatttttttccttttagatcttgaatttgcctgaactgatcgatgattgcaagtatagaacgaaccatcttcgggtacagaatagaaaagagcttgtgaaaatcctttcagcacggtaagcttcaacctgatacctacatgaagcatctggttctcccagtcagagacctatgtatgccttcctgcattttgaacacttctctacactgtctgtcctccatgtgtcaaatgctgttgtgtcagcggaggggctaatgcacacagagtatgggaatgagaatgggtgcccctttcctgatcattagttaaatataattctgattctactgcaaagcctcacagcccttaatgattaacctttcttcacaggagaattacccattcatttctactttttgcctctttgtctctaaagcatttttaattcatttaattggttgataggacttttcctttcacaccatggttaccaagtctcaataataggcacttgtgagaaacttatcaaaagctctttgatagaccaaataaatcatgttcatgctgtgagaagagtaagtcccaagaaagatataaaaccaggcagatgcaagtattgtcttattaagtcactagcacctagacacacaaaattaggatttgttgtgccctaaaactttgataaattcagttgtagaattgtactgttcaatgacttccagcagagagagagggagtgagagagagagagagagaggcatttaaacatttttgaactcataggctcattatttttctattaagattcaagaaagaataagaaagtatattgaaaggaagaatctagtaatagtcacagaaagaaactttgggaattcttcacttagggtggtttttttgtttgtttgtttgtttgtttttttgtttttttcagagccagtgtttacagtcccttctttttgtgtgttgactattttggcattaccttaacacttttatgattttttttttactactcccaatactttctcatccagggtatgtcaaatagctgggaggagggaagattagcgtgtctattcattctcacctacaagcacatcctttatctctctgaacaagcactaccagtgagttaaactatttagtggccagctttcaggagtctttaccaatgctttgaagcttgtcattctcatatatgatatatgttattccagtattttgaaaagttactggtttttcaaaaattttcaggactaagtccagttgactcagtttgaaatctagggtccttcatagtctgatattatggaaatttcctgtctgtaggtatctcactcatttccgttggaggccactaatctggccatacacacattttgtgtgttctgttttctttcccatacttagcatgtcctgaaccagacgtagctagatgtccatttctacattgctatgaagccacactgttatatttcttcctgggttctcaaacagataattgcacctttaggagagaatgtatgcagtctctagctcacatctagcttgtaatcaaacacaaataaaatgggctttagtcctggggatagtatgcctcaggggtctgcactggtcagtattctgatcttgacctaagaagtttcctttcaatcatttcagaaattgtgaaacatcactgaatgtcccgtggaaatagagacacattagtatgcagagggaagggaaggagaatcactattttgctagctcaagccctagacaggtgattattcttcctctttcacagatgccagtctgaaatttaggaaatgtcttacttttcaattgctgtgaagtgatcctatgaccaaggtccagagggttagtccatgaccatcatggcaggaagcatggcttcagacaggcaggtatggtgctagagcaatagctgtgagcttgtctccctttccacaagcaggaggcaggaggcagaaggcacagggccggggagttagagagggagaggggaagggagagggggagagaggaatgagctaactaactgtgaaaggtgtgggcttttgaaaccccaaagcccaccttcagtgacacatctccaataaggagacacatctcctaaaccttaacaagcaggtctaccaactggggaccaagcattcaaatacgagtgtgtgatggccattctcattcaaaccaccacaggctgtgtacacaatgaatggatagtaaatgtattttaaggactgtacccatttcatataccatatttctctcttgaagtcacacatagcaactttgtacttgtttatcaattcaacatgtactgcctggaggctcttgcttagtaagtgaataagttacaaggattggaaataaataaaacaggaaagtaaagtacataactgaaagacaacaaggggagggaaaggaccagtaccaaaagctgagaatgatgctggcttcatccctatccatgcatcaaggggcctggctgataaaatgaagtgtgaacagaggcctgtaggaattgagagaaatgagtcagcagacctctgggagaagtttctaaggctgagggcatgtgataaagtttaagaaccggttcaagatgctgtgtcctaggctaggggaggaaggccaaggccaaggttggggcacggacattgagagaggtgaaaagtacatcagggtgatgcttaaattgtgaaataaaggaattgtaggtttttggtaggaggttaaaaaatgagttagctctgcagcaaatctttacttgcgagaaagttcaaagtattccagtaaccttaagccaataaaacttccttctatttcagtggagtggccatggaaactcaggagtttccataggaagtacttctattaaaggattcttactcgggctctattgaggcccattaagggaatgctgtttcccaagggagcacctactatttcaacatacccctccccccccaacggtaagactttactcagtagggccagtaaatcaccttgttaaggaaccaccccacaaacaggtgggttcagtttatgccatgctaaagagataggagagataattatcctcttaataagactctgcactttgtctccccggagttcttattctctatatagttgtcatgaattctctgattcagaaaggtgcaacttttcctttctcttcgttttcttttggatattggccaggacctaagctaactttttagacccttggacgttttagctctttatcttacggtgcctccctattcctcatcttgctgaacctccatacctagcccccaggtccttgtgttcctgctttttcattctgcctcacctccaggcagctactgaggtttacagctagactgcttgtggtttttctagtaggtgctaataaaattgtccccgacctttcatctgaattgttcttaaggttttgttcttattaagaagactaagaaccctgagagaaagctcaatttcccttgtaacatttagtactcaatactggactctcttaaatttgtttacttgctcattcactcactcatttatttttacaaatatagaatacctacgacatactaaggactggcataaaaatatagacaaaatgcccagctccctgcatgcttgcagactttctagaagacagttcttgcagttgttttgagcatgtttttcatataatgttttctttaaaaaaaaaaaaaaccttctttttgcttcaaaaaatattacaactggagtgcattaaccatttattgtctttttaaatatattaatataaatgttatatttttctagtatctgccaatccctcttgaattggaagtatatttttagatcaaaagttacatcaacatgtgaatatagcaggggtttgcctgttgtctattatgaaaataggtacttttcttatgtgcctacatatatgctcatctttagaatatgtcaaactagggctgcatttctgagaatgaactagcagtacagataactcttaaaataaactaaaaataaactctaggcatgatggactcataagaaactcagttcctgcactcaatttgacaccccaaactgggaactgaggcattaccagacttttacaagtgtgtgctcctcagtagacatatggatttcctactgtggttcataatcttccaagaattttccttggcagtgactatttccatctttgccacagtaggattcatgtgaagtctgcagaatcaggaattccctttgtacacagtggaattcttagactgctcaaagggcctgtgggaggttttctttgactgttctcttggagtacctttggaggccttctctgagactcagctgcctgctttggtcatcaagtgtttctgtagccagcacacacagttccctccaggcctctcaggtgttcctaagtccccactgtgcctgccagcaaatcgtttttttttttttttttctttttgtaatatggaagacattccccttgagcttgccattttatcctgagtgttacagaaactctgtttacccagctgctaatgttgaacaccaggtaaagctaaaacttattaaaccttagctaaagcccaaagagtccaagttacagattggtccaggttctggcaagcacaaacacatcccatctttgtgatgctcaggaacaacagactcaacttgtgtgacttgtagataggaccacaagagggaagtctttatgtgtgttcagtccaagaaaagggggatggagacgatgtgtagtagtttggagagaaatatcaggaagccctgaaatgagactgaaggaatggagaacaatggcgaaagtagaaacaacattcatagcattccctgcctccctcctgcattactaacattctttggcctttgcctagataccctggtgcagcagacattggggtgaaatgtgaagccttggcttctgaggagttcctggtgtaattacgagagcaaatacataaagcagtgaatgactccacactagcagtgtgtggctagggccagggtggccagtgtgctgtggagcttaagagaagggactaaatgcttcagccaacgtcagccagggaagacttcctggaggcagttccacttgtcatgaatcttgaaggacagatggagttaagtgggggaaggaaaggtttttttttttttaaaaaaaaaaaaacagaaatatttatgtgagctaattttaaagactcaaaaaaaaaaatactgaatgaagaaaaaaaatgtggtttggaatgacatgggtattaacttttaaacgctgggaaactgttactaatgtaaagccagtgtctcttggattcagtccagaaagtcattgttaaaagtgctgtgctgctttctcatgagcaaaagcaacagtctgcacagtgctccagccatcgctggctgattcgatcccttaaatgatgtctcaggggcagggctgtgagcttacttaattttagagtttactatagtgaatcattgtgagattaaatgttccattttagggatttctaaaaagtggtgataaatgtttttggaattgaattaagaatttattttttaaaaattcctctaattatctaattgtcaccatgttttttttttaaatagatatgtacaaaatttttgaggctggaacctggaacataaattcagtgttaaaagagggactataagctcaaaggtacctgatttaatattagttaaccagaataaagcaaaaccagcaacactgacatcttgtgtgaggtccatgatccccatgccaggagactgaagagaacttgaggacactcaggtagttaggacctcactcactctgactagggttgcgaagcaggcagggactcaaacacatgctgccacacataggctgtgtacaggtaggcagcacacaggcttacagacagatacagtcagtgtggcaaaggcatagcctcagtcaaaggcccaggcctcccacctcaaagtcatatttatacagagtcacacaaaaatgatgttctgtcaaaagtagttatatagcagattatagtactgttgcttttagagtgttctgggaacagaatcagccattttgtgctgactcttaaaagtgtttttgagctttgtttctcatactcatttgagtctctgaaattcaatacatgatctttcagagaatacaagagtcagtgtacaacagagctgtcacagtagagttgaattggctaaatagggatgattgcagtgttaaggccaacaaagccaaggaaaaactgtagagactcatgctcgtacagtcagagaacctaaactggaggccatggtctcctaacgctcatcttgaaccagtactctgagtttcctgagtctcaggtttttgtaagttagggacatgtgacaatgcctacaccacagtgagcgctattaccaaggtacaaactgtgaagcagattccattgtgtagcataagctacccgcccaggctgttggaagatatattgttacttttgtattattatgacatacttgaaaaatgacattttatgaccaaatggacatacttgacagacagcaagagaggaattatttaaatgtttggtttgaattttcaaagcatttcagtctaccacagtagaaaaagtatagtagaatagctctgttcatggtgataggagagtggggtagaggccattcaaatcgtggaaaagaaagcagagaagacaggaagcagagccagggataccttgtaaatttcagacatttttaacttgggaagccatatttccccaaagaatcaaaagcctacttaaagagcacttccaactgggatacacatttaaaacaggagcctatgacaaatatttcaaaccatcacacagaaatacctcaatcttcaagaatcatcaattatggtatacctttattttgttttttagagacaggattttgctatgtagctcaggatagccttgaactcatagtaatctcatctaagtctcttgagtactagaattacagccattgccacattgaccaattctgatagtttttttttaaaaaataattccagttataatcattttattaagtcacaaagttcatgtacttgagagttttttctgcttaactatcattacaataattaattttggaaatttttatttaatataatagtatttttctgtcaattagaaatcttgattggaatgatataaatatagtattattgtgtgatctaatttggttcagttggcctgggcttgtagttagaaaatttatttctggataacttcaaaaaaataaaagtagctttcaggacttagaaatacatttaactttgtactactttactaatgaggctattcataggactcagtgtttttgaaaccctttgaattgggtcttcatcacccctggtccattccctttcaagggacacttgttccttagtgtgggcgatgaattttgaagtttaaacactttacttgagttacatttgcagctatctttgttcaagaatgaaacacttcagtgtgttctttagttgctgggctgttaagtatctacctttgttttcccgttgctgtgatagaacattctgaccaaaagcattgggagagaacagggtttatttgccttacagattatagaagccaagtcaggaactcctgtagaaacttgaaccttcattaggaactgaggcagagaccacagcaaatgctacttagtggcttgcttctatgttcacattcagttactgtccttgaattgcctaggtccacctgttcagggatggtattgcctacagtgggctggcttcttttcaagaaaagtttccacagacattctttttttttttccattttttattaggtatttagctcatttacatttccaatgctataccaaaagtcccccatatccacccacccccactcccctgcccacccactccccctttttggccctggcgttcccctgtactggggcatataaagtttgcaagtccaatgggcctctctttccagtgatggccgactaggccatcttttgatacatatgcagctagagtcaagagctgcgggttactggttagttcataatgttgttccacctatagggttgcagatccctttagctccttggctactttctctagctcctccattgggagccctatgatccatccattagctgactgtgagcatccacttctgtgtttgctaggccccggcatagtctcacaagagacagctacatctgggtcctttcaataaaatcttgctagtgtatgcaatggtccacagacattcttgaaggtcagttatatgggagaaacctctcaactgaggttttctcttcctgggtgtgttaagttgacaatgaagctagcatgctgcctcttgccaacactgacatgcagacacgccatttttaaaccatgacttttcctgtcttgcatgtcatcacgatcttattttaacaatataatataaaatgcagtactactttaaaagtctctcagtctacaaaaattgagattgtttaaaagttcaaaccagtctctttaaattatccaaagtttaaaactgagaattaaactactttctgactctacaacggaagaagcaaggcatagaaacaatcacacttaagagaaaaccaagtctagcaatgtagcccaactcctattgcttagtctggagtctgacactctttcatgatcatcaaggctccaaagaacttgcaagctctgccatctacgtcacatccagcttcttttataggctcaggcaggcttgcttgccactgtcattgctagttaacctgtggccttggcatttccagtgtgataggttcttcattgaacctgaggctacaccttcaccagtggccttttgacctttctgcctgagttctacactgctctatggtatgaagacttagtttctctgtgtggttccatggatcctctcagctttcgtatcatctaaaccagtaccatgtgagatccttaaacatttccaaattcagctacctgcttaagatgcagccttggtgttccttggaatacagtttttatgtcctaagcatgaggaaatatttcctagatttcctctcaaatatgccattcctttattaattacacctgacttttcaatcctagctaatcagcatttatttcccagtagttttcactttcacagtatatatgctatgaacagcactattagagtttttgctccttctgagacttcacaagccaagtcttcattgcccatgtttttcttaagtataaacttctattaaaaataacattctaacaatgtattaaggttccaagtaggcagtcttattccaaaagagacaaataaggccgtagcaagtgatttaacagctagaacagtctctgtgaacggcttcagccagggtgttttaaactcctgtgttacttttatgggtaaagtttcagtcttgtcttcccatttgattgcacttttgtgctgtctttcccgcctttcacagtttggactgtttcacgataaaacaatgagtagatgctatatatcaatctcctagcgggggaccatttatttgtatgaagactttagtaaatactggtttgctaagagaaaagtaaacttttatcattttgactggctggaaggaacctatatttcatgtaaaatagtccttcctcatacataattcgatgattcagaagatctgacattctaaaattagtttcctgctttccttaagcttgagatagttttgggagggtgaaggaactgatttcccagtgtgaagaggcctttccatcagagtgggttataatagagaggtgttggagagatcatcaagccccagcttcccctggtgggtggaaaagaatgccatgagaagctgagagcagtcagaggtccatgcctttcttctgaaacacacacagggctggaaggcagtggctatctctttggtgaattccactgctcctgaaacctggcagccatcaactctcctatgtctacatgtttttaatatccatggagaaactcattgttttcttcctctgaacagttctgttggtctcatgttccatatgatcacgttttaggatttcctctgccagcccctctcgtgacttacgttagcatctcatgaagatgcgtttcgtgtgatgtatatacatcctcgccctacacatttagcttattgtaacctctctccagcctctcctactgctctgagtcatagcattgttagtttatcttgcacccactgcagcagggctaatttggataaatggagctgatgttcggtgagggtcacatttgttttcttatgcattccttggcagctctgccattatcagctaatagatggtcccttgtaaaatgtctatatttgatgtagtacattttctaaatgttgattatttggagagagatttaaggccatgttgttattataaaacctgcctggagggtgaaataaagaaaaccagctctgggaatcatccctttggcttacagaaagctatgggccactgccagtctatagatgctcctgtgaccagggcactcttgactctgcaagagaggtctctgggacagagtcaaatgatagaacggaattccagccattctctccagccttctccattgtcttccagtcagctataaaccattccatactgtcttttaaaagaaagagctggatggtggctgcagaatatttatatgtgtgtgtagggagggaggggatgatggtagtgggcaagggtccagtaaatctgcttccctagataaaacacttaatgctctcattctcttttggaacttagcgcacaattttcaatttatagaatgttggaggctgaaattctttgtgaactggatagatcttggaaagacatcaaatttaactctttacctagtataaaaacctaaattatctgtatcatgatgggcctgggatccttgaaaacctggtgggagatgcatgggccagctttaaactcctcccttgtaggtgataaaactctccagacttctctggacactcttgtttcattcttaactcgtgcactggatagacaagctagagactcactcagtctccccacaggcaggtttgcttctctgactgccctgcttattcctctttcacctgcctgcctgcctgctcttggccagaatcctgtcctcttggcttttatgctcttagccttggctttacagtatagacctcccttagtctttccctctgtgcagtgatgttactggtcaaagcaggcttcacttctctttctgcaatgacagctactgtctcagcagagtcctgatttgtgtcaattgttccaggatattcactagttatcagggctcctggcccttgtcagctagactgtcctttaaagtttgtcaggtttctctctgtttctatggtaagattggatctatcttagttctagtttcctgtattttttttttttttttttactatcacatggtttactagtgaggcccaaattggaatctcttgatagccagctcctttctcggagccctctcagaatggttacacatcccccgttttttcctatccataaacttcatgtttagaatacttctagctagaatcacccttctgtttttctcctgcttttccttccattgcttatttgcttctctctgtcctttcttcaccctccctaccccattcattttcttattcctcctctctttttctctctttccctacctctaacttcctcttgtatccatataggaatgaaaatttaatattgtaatttataaatttatattttcccttcttaatgactcctttacccctcttttgtgaattgtttttcttttctcatttgctaactttagaaaaagaaaaatccagacattggaatgtctgagtttatttaagtctcagtactctgttcaatttaatgaatggaaacaaaaaaggcaaataaaaatgctggcctggatctttgtggctctgggattggctcttttggtggccatttagataaattggttttggggaataagtgcaagggatggtttcaagctgttttcaaacgtatcaacatatagcagtatagtgtaaagtagaaaaaattaaagtgatcagaaagaaattgttagaaatgtgattgttatttaatgatttaatgctgttatctacagtaaaggagagaggatgaagcagatcttagtacataactagaaatgcaggatgctattaaagtagatatatttgttagagtaaaaaggcactaagataccaacacagtgttaaaacacttcttagcatgttactaaatccaaaatcaatgtaaagaaacaaaactggaatgaagtgatttctggcatgtttagcagcaatagccccagcaacataaatagctaccaacaaggtagttcaaacatctcagtatggttgtcttctaaatcaaaataattcttatgttagttttaagaatagtcgttgtttgctaaaacaatgaagttgacaatcccaaattgtactatgtactaatgctagagcccaaaggaagatttagctggcagaggtagtttggataagaattacagaaaatgtagctggtttcaagtaggtgattgacatatctaaagaaaaaatctcaatagaaactccagagattaaccaaagaaatgactcacaagagctgagattctaatgacaaacctgtatggaacaggccctcagtctcactgaaaatcaagtgtagccgttacaatgactgaaatgagtttttctttttaaccattcaaatatttaacatttaaagtaattattatcaccacatgcatatatgacatattgattcatgtcctttagggagaaagtaactgggtaaagggttcatagagtccaaggtgtcattattaattacctgatcattccagttctgatttttttcccttgatatcatactgaaactctctagaaaaataaaggtaaagaaatttataatgataaaagaaaggacatgctacaaaacacataagagttctccacaatgctggaaataaaccgtgtaatatgatatttacactcccattgaatatgagttttgtaagaatttataactgtgtgggaaatgtttattatataatatttgcttttaaaggcaaattcacaggttacaattgaccctacctatctctatgatttagttgtgcgatttatgcatgttcatgtaataaactccaatcagaaacattagaaatgttgtatccacattgaatatgctcccttttgtcatggttatctccaatattctactactactgtttatgttgcatgcttgtcataagtaattgcctgaggatttgaaatgcataagaaactgtgcttaataagctacatgctaacaccatttgcataacagatttgagcattcaaggcatctggtgtcaacaggggtcctgaaaccagcttattgtgggtaccagaagagactgtacatgagacaatagaaagcaaaaccacaaaagaaagataccaaacgttcacttggctcttcctggacactaataagtagtttttgcttttagatccttagattcctgtttcctcaatttttaaattgattaaaatgagcaaaaagcacaatgcatctgtttgcattaaagtaatccattaactttattgcatatatttgagggacagggcttcacctgtgccatgttgcatctgtggaggtcagaagacaacttgaagctgttggtgttggtcctgggtactgtactcaggaaattagcacttttacctactgagctgtatcactggcccataagaagttttatatatataatcaaataatattatattagaagtaaccaaagtaatagaggcagcaacaaaaagaaactgaaagcttttgggctctgcactatctagtaagtacatagcttacacttaagaaagggaacaaaaggaagaaagaaaagcacagaacacagaggttacaggtcagcaattagtactatttatagagatgccctttgtcagtagttcatgttctttgattttatatgaagtaagcaatgattaacttctactttactccagaaaaatggctataactctataatgccaattttttggtttcaggtgtagttttatataatgggaaggaaaacccaacttggtaagagccaaactactccatattttatttgtatgctacacaacttttcattcttcaatataaaagaaggaatggttagatgaaagacagtccacctgggacttctgtcattaagtagcagaatctactaacaattatgcatgcttcttgtggttgtttatggtattatttaataaagcacacatactcattttaacagcaaccctatgaagctgttaaagcaatactcactagcaaaagttgtatattcgagaactgtcaataattctgtgctagcatctaccacatttttactaaatgtatcactttatctccacaacagcagcagctgcagcagaatatgacatttgattaaaactattttcaccagaacagaatataagctagagactacatttttctttcaagtagctttcatgcttcacctgccccaaagagcttgttccttccttctccaagatatcagcagtgcagcagctcctcctgcaaccaacagtgactgtccattctttttttaaaaatttttattggatatttttaaatttacatttcaaatgttatcccctttcctggtttcccctctggaaactccctatcccatccctcctgcaccctgcctctatgagggtgctcccccacccactccgccttccagtcctggcatttccctacactggggcatcaaatcccctcaagccactcctcccactgatgtccaacaagtccatcctctgcatatgtggccggagccctgggtccctccatgtgtactctctggttggtggtccagttcctgggagctccgaggggtctggcctgttaacattgttgctcacccccatgggctgcaaaccctctcagcttcttcagacccttctcaaactcctccattgggtaccctgtgctcagtccaatggctggttgctagcatctgattctgtatttttcatgctctggcagagcctctcagcagacaaccatatcaggctcctgttagcaagctcttcttggcatctgcaatcatgtctgggtttggtggctgtatatgggtccccaggtgaggcagtttctgtatggcctttccttcagtctctacaccacactttgcatagttccacccgtggatatttcttcctctttcttttctttctttttttaaattacatattttcttcatttatatttcaaatgctatcctgaaggttccctatactcacccccccccctgctccccagcccacccactcccgcttcctgaccctggcattcccctgtactggggcatataatcttcataagaccaaaggcctctcctcccagtgatggatgactaggccatcctctgctacatatgcagctagagatgcgatctctgggggtactggttagttcatattgttgttcttcctgtagggttgcagatcccttcagctccttgagtactttctctagctcctccatcgggggtcctatgttccatccaatagatgactgtgagcatccacttctgtacttgccaggcactggcctagcctcacaagagacagcaatatcatggtcctgtcatcaaaatcttgctggcatatgcaatagtgtctgggtttggtggttgtttatgggatggatccccgggtagggtagtctctgaatgatccttccttccatctcagctccaaactttatctctgtaactcatctacactttggtctttcttcttcttgagcttcatatggtctgtgaattgtatcttgggtcttccaagcttttggactaatatccacttatcagtgagtgcatgccctgtgtgttcttttgtgactgggttacctcagtcaggatgaagagctcctgatgatggcgtagcagcacaatgagctacaaatgcaataacaagaaccagacatatttaaccacttatccaagagcaaaaaacaaaaacaaaaacaaacaaacacacaaacaaaaacaaaacaaaaatagcttccaactttgctgtccagcttgagttgtttctaatgccattggcctcctctggatgtatccagagagcaaatgatttcagggtattcttgagtatgagacagttttataattggtactaggagcacatgggtttctgctggggtgcttattgtctatgttctttattgagctgtggtgattaaactaagaatctatgcctcacaattctctcccattaattttcctttagatactcactgtctctttcagttactggcaggcttggtaggtggactggaaagaatcatgctgggttctccccattcacctaacccagctccaatttgactcattaaagtagggactttaaccaacaccagagttacttgtgtcatgttggagaatgtaaaatactgacattattaaaagaattcacttagctaaatatgtcaggataatccagaagcagcagaagggattatcataatttgactttgcctaaaatcccaatcaacccatggtcacggatatagagttttatcagggaactgattctaatgaacaggaatgtgttagctggcattgcagtagtgtagctcagtcatgttgtggacactgagcatgctgtacagtattcttcagattcatggccctgaacatgggaagccagggcatttatttatcagcccacctcccaaagcctgagggttgcctctaaagtttagtccaagccacaagcaaagaaacacagggctttgaaattggaggaggctctatatgaactttgagtgaaatccagattgaccagaggacatggaatgaggtatttttagcctttacagctattggtgtctgaggacaagagaagggaaagagttgtggttagtgtaagttgaagcttgaataaagctgttgaagtctcaacagttgttctgtcctattaagatattatagtagttaagttataggtgttttagattttattctctctataaattgggcataataataataatctccaactctaaaaatgtgagagaattaaagggacactataaagtgattgccatacaataagcactactgtgtagtacttttaggagtctggcagggttgcagcagtgtggtggacgctcatttgctttgtgtaaagtaattttgttagtgtctctcaagctctgtgtcctgtcgacttgtataaaatcttaaccacaaagcaccattttttttctattttcttcttaagctgagtctttttttttcttatacatttattatttgaggccttaaatacatttttattattccattttaaacgacgtcagctctgtttaaactaacaagattgctttttctatctgcttctgtttcttataatactcaccaatatgacatcagcaagtctccattaaagttttgtaataaaaagcagctttgctactaaagaggagaactgaactctctgggtatgtgtgaaccacttggtagggagaggtgtcacatgtttatctgatacacagaggtaccttggatgaccttgccagtagctcttatcaaacatagcatgttacctatgggattcatcttggatttctatttaaaacccaattaaagcaataacattggattaatattagctgcctctaagaaagctgtattggttactaattcttactatttccttttgtaagcataaaatgactacttacacatttattcaacaaatatgtattaagttcctactctgtcaaaaaaaaattctttttttagagtcttaggatgaacttcccaagcacccatagcaaattctttttcttcacaaaaggccagaaataatgggtggataccaggctgcccctgtggttacagactggcagagcaggagagtgcccaattcactctcctttcccagattccagcagcagtgaagacatatacttcctatgtccatagagtcaccagttaatcatcagctccatccatccatgagcatggtcactggcttcctcttttcgtgtgctcccttctaggtgatgggaagagcgtaggttctggagctcgcactgtctggttgcttattctgttcttgtatatgcatgaccttgggaaatcactcaaatctccatacacttcagtataaaatgggatgctaataggatttatcccataagattattttgagggttgaatgtgatatctatggaaagcgcttaaaactgttcctggcacatagcctgttccataaaagtgtcagctatcaaatgttaggctgtcttgctataacagcacaacaggaaagagtccggcctgtcttgtagtgcttcctgccttatactgctagcagccagtggggatcccatatgcttcattaaaccacaagactactttaatcattctttctccttccctttctccctctctccctccttccctccctctcttcctcttaaagggtttgaaaagcattgattacaaaggaatattacaaattagtttatatctttaaacctttttagaagtttgttaacatactcatagttatgtatatgcacataacataaattctctttatgaattgacttaaaattgttttgtgtgcatgtggtataaggtatatatagctatatacttactataaattactcacagactggcctgttgtatgcctatttcatggtatattgataattttattactttttgtcatttgttgtctttatttatttgtttattttggaggcattgtctcgctgtgtagtcctggcttggctgaaactcattatgtagaccagactggcctccaactcagacatacctgcctctgcctcctgagtggtggggttaaaattgctttaggaaaatattatgattattaaaatcatttgttttttatatcattagacaaatggagtctttcactataactaaactgacaaatatatttcttgttacttattaatagattgttttcaaaaatttctgttattgcttgtttgaggtaaggtctcaaagtcaccgaatttgttccttttaaagtaaaagttaggttgagtgtgcttttaggtgaagatttgtttttaccttttgtttttgtttgttttttttttttgttttttgtttttttttaatttctgatttttcttttttttttaaaatatttttattgtaacgtattttcctcaattacatttagaatgctatcccaaaagtcccccataccctccccaacacttccctaccacccattcccattttttgcccctggcattcccctgtactggggcatataaagtttgcaagtccaatgggcctctcgttccagtgatggctgactaggccatcttttgatacatatgcagctaaagtcaagagctcaggggtactggttagttcataatgttgttgcacctacagggttgcagatctctttagctccttggatactttctctagctcctccattgggggcgctgtgctccatccaatagctgactgtgagcatctacttatgtgtttgctaggcctcggcatagtctcacaagagacagctgtatcagggtcctttcagcaaaatcttgctagtgtatgcaatggtgtcatcgtttggaggctaattatgggatggatctctggaaatggcagtctctagatggtccatcctttggtctcagctctgacctttgtctctgtaaccccttccatgggtgattgtttccaattctaagaaggtgcaaagtgtccacactttggtcttcattcttcttcagtttcatgtgttttgcaaattgtatcttatatcttgggtatactaagtttctgggctaatatccacttatcagtgagtacatatcatttgagttcttttgtgattgtgttacctcactcaggatgatgccttccaggtccatccattttctaggaatttcataaattcattctttttaatagctgagtagtactccattgtgtaaatgtaccacatttttttgtatccattcctctgttgaggggcatctgggttctttccagcttctggctattataaataaggctgctatgaacatagtggagcatgtgtccttcttaccggtggggacatcttctggatatatgcccaggagaggtattgctggatcctccgatagtactatgtccaattttctgaggaaccgccagactgatttccagagtggctgtacaagcctgcaatcccaccaacaatggaggagtgttcctctttctccacatccacgccagcatctgctgtcacctgaatttttgatcttagccattctgactggtgtgagatggaatctcagggttgttttgatttgcatttctctgatgattaaggatgctgagcattttttcaagtgcttcacagccattccgtattcctcaggtgagaattctttgtttagctctgagccccattttttaatggggttatttgattttctggagtccaccttcttgagttctttatatatattggatattagtcccctatctgatttaggataggtaaagctcctttcccaatctgttggtggcctttttgtcttattgacagtgtcttttgtcttacagaagctttgcagtttcatgaggtcccatttggcaattctcgatcttacagcacaagccattgctgttctattcaggaattttccccctatgccatatcttcgaggcttttccccactttctcctctataaatttcagtgtctctggttttacgtgaagttccttgatccacttagatttgaccttagtacaaggagataggaatggatcaattcgcattcttctgcatgttaacaaccagttgtgccagcaccatttgttgaaaatgctgtctttcttccactggatggttttagctcccttgtcaaagatcaagtgaccataggtgtgtgggttcatttctgagtcttcaattcttttcctttggtctacttgtctgtcattataccagtaccatgcagtttttttacacaattgctctgtagtaaagctttaggtcaggcatggtgattccaccagaggttcttttatccttgagaagagtttttactatcctaggttttttgttattccagatgaatttgcagattgctctttctaattcgttgaagaattgagttggaattttgatggggattacattgaatctgtagattgcttttggcaagatagccatttttacaatgttgatcctgccaatcaatgagcatgggagatctttccatcttctgagatcttctttaatttctttcttcagagacttgaagttcttatcatacagatctttcacttccttagttagagtcacgccaagatattttatattatttgtgactattgagaagggtgttgtttcccaaatttctttctcagcctgtttatcctttgtgtagagaaaggccattgactcgtttgagttaattttatatccagctacttcaccgaagctgtttatcaggtttaggaattctctggtggaatttttagggtcacttatatatactatcatatcatctgcaaaacgtgatattttgacttcatcttttccaattcatatccccttgatctccttttgttgtcgaattgctctggctaggacttcaagtactatgttgaagaggtagggagaaagtgggcagccttttgtagtccctgattttagtgggattgcttccagattctcaccatttactttgatgttggctactggtttgctgtagattgcttttattatatttaggtatgggccttgatttcctgatctttccaagacttttatcatgaatgggtgttggatcttgtcaaatgctttctctgcatctaacgagatgatcatgtgattttgtctttgaatttgtttatataatggattacgttgatggatttccatatattaaactattcctgcattccttaataaaacctacttggtcaggatggatgattgctttaatatgttcttggattcggttagcaagaattttattcaatatttttgcatcgatattcataagggaaattggtctgaagttctctatcttttgtggatctttctgtggtttaggtatcagagtaattgtggcttcatagaatgaattgggtagagtaccttctacttctatttgtgcagaactggaattagatcttctttgaaggtctgatagaactctgcactaaacccatctggtcctgggcttttttttttttttttttttttttttttgcctgggagactattaatgactgcttctatttctttttaggggatatgggactgtttagatcgttaacttgatcctgatttaactttggtacctggtatctgtctagaaatttgtccatttcgtccaggttttccagttttgttgagtatagccttttgtagaaggatctggtggtattttggatttcttcaggatctgttgttatgtctcccttttcatttctgattttgttaattagaatgctgccttgtgccctctagtgagtctggctaagggtttatctatcttgttgattttctcaaagaaccaactcctcatttggttaattctttgaatagttcttcttgtttccacttggttgatttcacccttgagttgattatttcctaccgtctattcctcttgggtgaattttcttcctttttttctagagcttttaggtgnnnnnnnnnnnnnnnnnnnnnnnnnnnnnnnnnnnnnnnnnnnnnnnnnnnnnnnnnnnnnnnnnnnnnnnnnnnnnnnnnnnnnnnnnnnnnnnnnnnnnnnnnnnnnnnnnnnnnnnnnnnnnnnnnnnnnnnnnnnnnnnnnnnnnnnnnnnnnnnnnnnnnnnnnnnnnnnnnnnnnnnnnnnnnnnnnnnnnnnnnnnnnnnnnnnnnnnnnnnnnnnnnnnnnnnnnnnnnnnnnnnnnnnnnnnnnnnnnnnnnnnnnnnnnnnnnnnnnnnnnnnnnnnnnnnnnnnnnnnnnnnnnnnnnnnnnnnnnnnnnnnnnnnnnnnnnnnnnnnnnnnnnnnnnnnnnnnnnnnnnnnnnnnnnnnnnnnnnnnnnnnnnnnnnnnnnnnnnnnnnnnnnnnnnnnnnnnnnnnnnnnnnnnnnnnnnnnnnnnnnnnnnnnnnnnnnnnnnnnnnnnnnnnnnnnnnnnnnnnnnnnnnnnnnnnnnnnnnnnnnnnnnnnnnnnnnnnnnnnnnnnnnnnnnnnnnnnnnnnnnnnnnnnnnnnnnnnnnnnnnnnnnnnnnnnnnnnnnnnnnnnnnnnnnnnnnnnnnnnnnnnnnnnnnnnnnnnnnnnnnnnnnnnnnnnnnnnnnnnnnnnnnnnnnnnnnnnnnnnnnnnnnnnnnnnnnnnnnnnnnnnnnnnnnnnnnnnnnnnnnnnnnnnnnnnnnnnnnnnnnnnnnnnnnnnnnnnnnnnnnnnnnnnnnnnnnnnnnnnnnnnnnnnnnnnnnnnnnnnnnnnnnnnnnnnnnnnnnnnnnnnnnnnnnnnnnnnnnnnnnnnnnnnnnnnnnnnnnnnnnnnnnnnnnnnnnnnnnnnnnnnnnnnnnnnnnnnnnnnnnnnnnnnnnnnnnnnnnnnnnnnnnnnnnnnnnnnnnnnnnnnnnnnnnnnnnnnnnnnnnnnnnnnnnnnnnnnnnnnnnnnnnnnnnnnnnnnnnnnnnnnnnnnnnnnnnnnnnnnnnnnnnnnnnnnnnnnnnnnnnnnnnnnnnnnnnnnnnnnnnnnnnnnnnnnnnnnnnnnnnnnnnnnnnnnnnnnnnnnnnnnnnnnnnnnnnnnnnnnnnnnnnnnnnnnnnnnnnnnnnnnnnnnnnnnnnnnnnnnnnnnnnnnnnnnnnnnnnnnnnnnnnnnnnnnnnnnnnnnnnnnnnnnnnnnnnnnnnnnnnnnnnnnnnnnnnnnnnnnnnnnnnnnnnnnnnnnnnnnnnnnnnnnnnnnnnnnnnnnnnnnnnnnnnnnnnnnnnnnnnnnnnnnnnnnnnnnnnnnnnnnnnnnnnnnnnnnnnnnnnnnnnnnnnnnnnnnnnnnnnnnnnnnnnnnnnnnnnnnnnnnnnnnnnnnnnnnnnnnnnnnnnnnnnnnnnnnnnnnnnnnnnnnnnnnnnnnnnnnnnnnnnnnnnnnnnnnnnnnnnnnnnnnnnnnnnnnnnnnnnnnnnnnnnnnnnnnnnnnnnnnnnnnnnnnnnnnnnnnnnnnnnnnnnnnnnnnnntattatcctttgaagggctggatttgtggaaaaataatgtgtgaatttggttttgtcggtgtccagcccttcaaaggataataaagataaaactccaacacaaggagggaaactactctttaaaaaaagcaagaaagtaatctctcaacaaacctaaaagaagatagccacataaacaaaattccaactctaacaacaaaaataacaggaagcaaccatgacttttccttaatacctcttaagatcaatggactcaattccccagtaaaaagacatagactaacagactggttacttaaactggacccaaccttttggtgcatataggaagcccacctcagtgacaagacagacactacctcagagtgaaaggcaggaaaacaattttccaagtaaatggtcccaagaccaagatggagtagccattctaatatcaaataaaattgacctccaacccaaagttatcaaaaaagataaggagggacacttcatattcatcaaaggaaaatttaccaagaagaattctcaattctgaatatctatgttccaaatgcaagggcatacacatttattaaagaaacttcagtaaagctcaaagcacacattgcaccatacacaatagtagtgggagacttcaacaccccactctcatcgatagacagatcctggaaacagaaactaaacagaggcatattgaaactaacaaaagttatgaaacaaatggatttaactgatatctataaaacattttatcctaaaacaaaaggatataactttttctcagcacgtcatggtaccgtctccaaaagtgaccatataataagttacaaaacaggcctcaacagatagaaaaatattgaaattgtcccatgcatcctatcagatcaccatggactaagggctgatcttcaataccaacatgaataatagaaagccaacattcacttgggaagctgaacaacactctactcaatgataccttggtcaaggaagaaataaagaaattaaagaggttttagagtttaatgaaaataaagccacaaccatacccaaacttatgggacacaataaaagcatttctaagcggaaaactcatagctctgagtgcctccaaaaagaaactagagagagcacacactagcagcttgacaacacacctaaaagctctagaacaggaagcaaattcacccaagaggagtcgacggcagggaataatcaaactcagagcttaaatcaacgaaataaaaacaaaaagaactatacaaagaatcaaccaaaccaggagctgtttttgtttgtttgtttgtttttgtttttgttttgagaaaatcaacaagatagataaatccttagccagactaactgggggacacagggaccatatcctaattaacaaaatcagaaatgaaaagggagacaacaagagaatcaatcatcagatcctactacaaaagcctatactcaacacaactggaaaacctggatgaaatggacaacttcctagacagataccaggtaccaaagttaaatcaggatcagattaatgatctaaacagtcccatttcctctaaagaaatagaaacagccattaacagtcttcctaacaaaaaaacaaaaaaaaaaaaacaacaaaaaaaaaaaactcaggacctgatgggtttagtgtagagttctatcagaccttcaaagaagacctaattccaactctcctcaaactattccacaaaatagaaacagaaggtactctacccaatttgttctatgaagccacaattactctgatacctaaaccacataaagacccaacaaagtaagagaacttcagaccaatttccctgtgaatatcaatgcaaaaatactcaataaaattctcgcaaaccaaatccaaaaacacatcaaaacaatcatccttcatgttcaagttggcttcattccagtgatgcagagatgcttcaatatacataaatccatcaacataatccactatataaacaaactaaaaaacaaaagctacatgatcatctcattagatgctgagaaagcatttgacaatatccaacacccattcatgataaaagtcttggaaggatcaggaattcaaggcccataactaaacatattaaaggcaatatacagcaaaccagtagccaacatcaatctaaatggacagaaacttgaagtaatcccattaaaatcaggaactagacgaagctgcctactctctcactacttatttaatatagtacttgaagtgctagacaattagacaacaaaaggagatcaaggggatacaaattggaaaggaagaagtcaaaatatcactatttgcaggtaatatgatagtatatataagtgacccccaaaattccaccagagaactcctaaacctgataaacaactccagtgaagtaggtggatataaaattaactcaaacaaatcagtggtcttttctacacaaaggataaacaggctgagaaaaaaaataggggaacaacacccttcaaaatagtcacaaataatataaaatgcctctttgtgactctgctgcaggaacctcaccagcagttctttgtcaagcttctctcaatggtagtgttaccataagttcagctcaatgctatataaggcaaaccaatacatgcatattattagcaatgaacaaccaaaccaatgctcagggctcaactctcagtgtctctggcgtcatatttatattccttcatcacaggttcttccatgtttttgctatatcaaaacatcctttcacctgtgtctacttcaggaaaacattccttcatgtgtctgctttagcaaggcatcctttgatctgtgtgccccagcaaaacatcatttgacacaactaactttccaaagaaattagaagtttccacttcaaggaaactgcttacaattcatttaacacttcatctccttttcaagttcttcttttgttgactattaaataacacatcagcagacagaggggctgtgtttttcaatttaatttttctccatagaaattccagaagtgaaatgtgtttactactcctttctcttttgccttagataagttgtttgaagatttgcatttttacttgctttgttcagtgtttcaacttctgacagtgcctcttgactgattcaggaaatcctcgttgaatatactaatgcaatggtgttgtaatgggtgaagtataatactttcatttctagaatgagatttagttataaatatgcttattgtggttatattctccaacaatagcaaaataaaatgtacatatctaacaactggagtttaaatatctgagccttgttccttatagtggatattttttaaaaattattagttctttgagaactttgtacaatgtttttgttcctattcactccctcctccaattgtatcagatctaaccctccttctctatctactcaatcaacattgctttttgtttctttttagctctaaagataggtataggatttaaaacatagttcccctatctgtattgagatgtcatctggcttgagcacacacaggtcttgtgtatgctgtcatgactgctgtgacttcattgtacagctttctggctatgtccagaagataatgttttcgtgaagtcattctctgactctggctcttatcttatactttttttgccacctcttctgcaatggtccctgcaagtgggaatgtagtgtgtattctatttagatctgagtaatatgaaatttatttatttatacattggataattgtgagtccctgtgttagtcaccattgctgcatatggaagcttctcaaatagggccggagaaatatactagtctagggctataataataaggtactaggaatcagtaatatgtacatttaacaaaaaatattagtagtaagttctcccctaaggcttaatacctgtgtagccataattttctggcctgaaaattctgtgaagtacaggtttcatcttgtggatttgaatctaaacccaatcagaaactacttgttaatagatggcattcatgtaactattatacctgcagcaatggctcccacaccctttcttattgtggctttctgtgttcacagctgagtatattcgatgattatttttctcttccagtagattgcatagcaccttctatcagtatgatagctactcagtagggatgaaccttttttcagtatcagctcaaatttttcatgttgtacaattcaagtatttggtgtgataagctataggaccatacaatcaagttctagggggcaaccaagaacattaacaatagcctgtattacatgagagtctatggaacctctctggccaacactccaaacaaaacaaaacaaaacaaaacaaaacaaaacaaaacaaaacaaaacacctctaaccagtcctaactggacttttatttgttagactctagagtctaggagaagcattgtttctctcttatagggcagctttaaaaaatgtggtgtgtgtgtgtgtgtgtgtgtgtgtgtgtgtgtgtgtgtgtgtgtgtgtgtgtgtgtgtgttaggaagactacagtagtaggcttccatgcgacatgcaacagttttgaaaggccgttagtattttttatccctccttttatcctctccaatggatattcttgaagcagttcaaataactcagtatagaaatttttaaaaatctatgcatagtattgccaaggttaagatgtttacaaaatattgtaagctatttttaatttttaaaatatatgcttattcaaaaatgcaaaaggatatacatccatactttggtcttccttcttcttgagtttcatgtgttttgcaagttttatcttgtgtattctaagtttctgggctaatatttacttatcaatgaggcctatcatgtgagttcttttgtgattgggttacctcactcaggatgatatcctccggatccatccatttgcctaagaatttcataaattcattgtttttaatagctgagtagtactcccttgtgtaaatgtaccacattttctgtatccattcctctgttgagggacatctgggttctttctagcttctggctattataaataaggctactatgaacatagtggaacatgtgttcttattaccagttggaacattttctgggtatatgccaaggaggggtgttgctggatcttccagtagtactatgtccagttttctgaggaacttctggactaatttccagagtgattgaacaagcttgtaattccaccagcaatgggggaatgttcctctttattcacatttgttgtcacctgagtttttgatcttagccattctgtctctccttagaatggggaacaaaatacccatggaaggagttacagagacaaagttggagctgagatggaaggaaggaccatccagagactgccccacccgggatccataccataatcagccaccaaacccagacactattgcatatgccagcaagattttgctgacatgaccctgatatagctgtctcttgtgaggctatgccagtgcctggcatatatagaagtggatgctcacagtcgtctattggatggaacacagggcccccaatggaggagctagagaaaatacccaaggagctaaaaaggtctgtaaccctataggagaaacagcaataagaactaaccagtactccctgagcttgtgtctctagctgcatatgtagcagaagatggcctagtcagccatcattgagaggagaggcccttagtcttgcaaagattatatgccccaatacagcagaatgccaggtccaggaagcataagtgggtaggatggggagcagggcagggggagggcataggagacttttgggatagtatttgaaatgcaaatgaagaaaatatctaataaaattgttttaaaaaagatatacaaaaaaagaatatacatcaccaaaattatttccacatgacaaagaaatatttgcttttatttctacctaactaaataacttttctccaataattttacattactttattaatagctcttctgatgggtgtgtcattttctagcatggataggcaacctatcaggtctccgaaccaagacaatgtgagcaaatttttggtatcagatttgcacagtgctgttggtgttcataagcagatacagtgctgctagacagactagtgatacacgataatccatacttcatttaaaatctccccacaatagttcatttgtgatctatgaatgataatatgtgtgaatcagaattgctgatatactgaaaattagtgttagttttaagacatgtcttctaagtgacactgggaaagaagcctttgactgaatttcctggatatatgttcattttttgtgtggcctgtaaattagcatgcagataatggggagagtaggtgaatgctgagggaaaagaagatagctttagccataattcattgtaatagagaagggaaaatacccaagaggaaataaggtctgaagaaattgcaggaaacattaaacccatgattctgtttatggtagaatatcgatcaacaaattccagctgtttctctgtgggttatagaagtgtcacaagcctgtttatagttactgagctaggaactccagtctggattttgtagagcctcactggtttggtttgggtttattcatatttgtctaaagatcatttcctgtaggactgcagcccactatcaaaattttatttctaaaattcccattccaataactgctacttccctgccaataattttctccccataatgttagcttagttgtatatgtctaatactaaaacagcacttaactagtccttcatactattctaaatgcccacaatatgtccatttaatttctcataacaattggatgaactaggtattgttatgtctcaaagcagtataaaagccagaattcttcagcacaacaataagaatttgacaacattaaaagaaaaggttttgtctggagagatgctcactgggtaaatgattgattcataagcctcaggaccagagatcaaatctgttacatatgtcaaaaccagacatggccaaatgagcctgtacccataccattaggggttggggtaaggtggattctgggataaccctagcaagcacgactgatttgaaacactgagcttgatccacttagacttgagctttgcacaagaagataagaatggatgaagttgtattcttctacatgcctacctccagttgaatcagcactatttgttgataatgctgtcttttatccactttatggttttggcttctttgtcaaagatcaagtaataataggtgtatgggtttatttctgtgtcttcagtcctattccattgatctacctgcttgtctctctaccaatagcatgcagttttttgtttgtttgttttttgtttgttttccactattgctccaggtctgggatagtgattcccctagaagttcttttattgttgagaatggttttacctatcctgggtattttgttatttaagatgaatttgagaattgatctttctatctctgtgaagaattgagttggaattttgatagggattgcattgaatgtgtagattgcttttggtacgatggccatttttactaggttaatcctggcaatccatcagcatgggagatatttctatcttctgaggtcttcttcaatttttttcttcagagacttactataatatcaacaattgacaaatgagacctcaaaaaattgaaaggcttctgaaaggcaaaggacactgtcaatgagacaaaatggcaacccacagattgtgaaaagatctttaccaacccaatagcccatagagtgctaacatccaaaatattgcaaagaattcaagaagttagatttcagacatcaaaataaccctattaaaaactaaggtacagagctaaacaaagaattttcaactgaggaaccttgaatgactgagaagcacttacgaaaatgttcaacatccttagtcagcaggtaaatacgaataaaaatgaccctgagattctactttacaccaatcagaatggctaagatcaaaaacaaatgtgacattagatgctaggttggatgtggagaaagaggaacactcctccattgctggtggaactgcaagctggtaaaacaactttggaaatcagtctggcagttcctcaaaaaattggaaatagttctacctgaagactcagttgggcatatacccaaaaagtgttccaagatataacaaggacacatgcttcactatgttcatagcagcattatgtataacagccaaaagctgaaaataacccagatgtccctcaacagaggaatggatacagaaaatgtggtacatttacacaatggagtactactcaggtattaaaacaatgacttcatgaaattctaatgcaaatggatggaactagggcccctaatggaggagctagagaaagtactcaaggagctgaaggggtctgcagccctatagggggaacaacaatatgaactaaccagtacccccagagcttgtgtatctagctgcaaacgtagcagaagatggcctagtcggccatcattggaaagagaggccccttggccttgcaaactttatatgccccagtagaggggaatgccagggccaagaagtgggagtgggtgggtaggggagcagggcgagggggcagggtatagaggactttggggatagcatttgaaatgtaaatgaagaaaatatctaatagaacattgaaaaaaaaaagaaaatattatcctgaatgaggtaacccagacacaaaagaacatgcatggtatgtactcactgataagtggatattagtccaaatgctcataatacccacgatacaacccacaaaccatatggagcttaagaagaagaaagatcaaagtgtagatgctgcagtcctacatagatggggggagcaccataatcacaggagggagaaggagggaaagggaaagaatagggggacaggatcgggtatttgaagggacaggagagaattacagaagatcagtaaattaaatagaaacatatagcaatgggggatggggaactggagtagtcactagaaagtcccagatgccagggaagggagaggctcccaggaccccaatgcaatgactttagcagaaatacccaacaaaggggatatagaacctgtagaggccatctccagtagataggcatggtccccagttgaaggatggggcttctacccatctcaaaaattttaacccagaaatgttcctgtccaaaggaaagacaaggagaaaacatggatcagagactgaaggaaaggctatccagagactgccccacatagggatctatcccatctgtggatatcccccctctcccacacacactattgctgatgccaagaagtacttgctgacaggcgcctggtatggctgttccctgagaggttctaccagcacctgaccaatacagatgtagatactcacagccaaccattggactgatcctagggaccccaaatggaagagctagggaaaggattgaaggagctgactggaattacaaccccataggaagaataatataaactaactggaccacctatagctcccaggaactaagccatcaaccaaagaatacacatggaatcaccgatggctccagatacacatgtagcaaaggatgaccttatctgacatcaatgggaggggagggccttggtcctgtggaggcttgatgccccagcatagagggatgctagagtggtgagacatgagtgggtgagtgggaggaggaacacgttcatagagttaaaatggaggagggagaggggctatgggattgggggggggtgtctgtggatgcataactggaaagtgggatattatttgacatgtaaacgaataaaatgattaaaaaggaaacaacttcagattcagtaacagattaaggtggcaaataaaaaagatattcaatgttctcctttgtccattgtatacacacacacacacacacacacacacacacacacacacacacacacacaggaaatgggggagggaggcatatcatgcatgcatacacatactcttccaaactcatattcctgcatttccccacatcacatcacaacaccacacataacataaatttttttccatatgaaaagttacataagagaaaaaaagcaagcagtagtctagaaatcaattgaaatatagaaaagcatatatttggcgaaggatctgttcttttattattcagcagttctgataagctcataatatacaaagagaaacaaaatagcatccaacattttgtgactactaggatataatatttatttttatttctgtgggaaatgcaggttatacagccctaagatatcactccatatatattctactgacagaacttgaactctggtagcaacagggttaagaatgttgtctgtgctagaagtaccagtgagtgtaaaatcttttagagaactctttggtcaaagatagcatggtaaaatgtgcctgcaactcagcagttctgcctctctctaagtaaagacatgttacgtccctaggaagaaatgaataatgtacacagaaacattatgtatattgggaacactggagagaagggatcattggcaggaggaaaagtagccaggtgcagtagtacatacctgaggatgaggtaggacgattattaagttccatgtagccagggattgtgagacttcatctcacagacatgccagctgtatcaggtccatttttattgctgtggcaaaacattatgatcaaagaaacttatagaaagaagagtttttctgggtttcggttccagaaaaataaaaatgtattatggtcgggaagcttggtagcaagcaacaagcatgatcgccaatggttcacatcataaactgcaagcaagaagtggagaggaaaagctgagaatggtgccagtctttaaactcttaaagcccgcctccatatctgttaaacctccccaaacagtgccactaatggggactgagaattccaaggcacgagactatggtttcaaaccacaacattctactttctggaccccatagtcctgtggccatctcataaagcaaaatgcatttagtctaactttgaaactccctatagtctggattgtgactatgaatgagaagctggaagggttctgtccccagctgttccttggttcctgtgtcctgatggctctgggtgggtccctcttgggtctctcttgggtcaagaatttgagcagaagtggtggtctcacctgtgctctcaggtatgtcagcactccttggagacctctcactcgcagggacttgggtatggagagctgtggctgagattccaggcaatctattgattgtaaacctccataaaataaaaaagttaaggacatacttttgacatattaactttactactccaaatggaggaatgggacatagtgagggagcaagatcaaaagccagcagagggaatgccaaattgtctagcttcatgcccagtgtctgaggccaagtattcagatacaaggaactatgagtacatcatgttcaaaccacaacgtcaaaccaaaaaattactgtagtgcatttaaacaagaatatgcttactggaaaaagtaattgagtatatatccatgtgtgacatcattgggtagacaaattagcatcacaaataagaaaagaaattgtataaaatgtacaaatacaaaatatattacttatgttacttagtaattaaatgaaaaatacatgtttatcttaaattcagtaaaatgaaatgatgcacagatgaaatataaatactattgtatgattataaagatgcaaaaatgtaatataaaactctagcatgaatagagaggtgaacatatgtaatatagtctactatgaatagagaggatcctttcaatttccatctgtgcccagagctgaccttgtgccacagctctccatacccagatcccaccaggagtgagctagtctcccaagagtgctgacacacctgagagcacaggtgacaccaccacttctgctcaaattcctggcccaagagggacatgcccagagccatcaggacataggaactaaggaacaccctgggacatgatccttctagtttccatctgtgccccagagctgaccctgtgccatagctctccatacctgggtcccaccaggagagagctggtctcccaggagtgctgacaaacttgtgagcacaagtaggaccaccacttctgcccctagggacccatgtgaagtcctcagaatgtcaggaatttgaactgaggtgtgtagcaatgggcgatgggaaagtgggtgtagcaactataaaatcccagatgctaaaaaagcaaaagcctctcatgatctcatggggatgacagtagctgaaataccccacaaaggggagggtgaacctgtcaagaacatattcagagtttaggcatgaccccggttgagggatgaggtcacccacccaccaccaaaattttaacccagaattgctcatgtctaaaagaaatacagggacaaagagtggagcagagactgaaggaaaggccatccagagactgccctacctggggatccatcccacatgcagacaccaaacccagacgtgcttgctgacaggagcctgagacagctgtctcctgagaggctgtgccagagcctgaccagtacagatgtggatactcacagcacaaggactccaatggaggagttaggggaaggactgaaagaggtgaaggggccttatctggcatcaatgggagggggcccttggtcctgtaaaggcttgatgcgccagtgtagcggaatgctagggtagtaaggcaggagtgggtatccgggtgaggagcaccctcatagaagcagggtaaggggagatggaataggggatttgcagaggggcaaccgggaaaggggataatatttgatatgtaagtaaataaaatttcccgttaaaaataatctatttatgtaaatagagtttagacttttatggttgtctcctctaggtgctgtgaactgaattatactgtaatgcattgatgtcaactgctctttaaaaattgatcattggtctattaatttttaaattaaaatataattacatcaaaagaatagagagatagatgttatataaataacatgaatagagatacacagatgtgatataaataatataatgcaaatagagatagatgcacagatacagttaaaatattataatctgaatgcagaggtgaataacagtggtatacataacatgaatagaataatgtaacatgacagttatattatattgttatataacattatattatagaggtacacagattaatataaatactgtagtataaatagtaagacatataaatgtaatataaatactatagcaccaatagaaagatactcttacttagtaggtcttacatccaaataaacatgttgattataatcaagatatatgtatcaccattagggatatcttgccatgctgagcatatttgtggttcatagacatcaaaacttggtagaactattaattacatcccttcctttagcactttgcacagcagcttctggtattatgaagatagttcccaaggaagaaactttatggccaggtgcaccttgattcgtttaagtcctatgtctaaagtacaacggtgtattcagcaacaggggcttaccttcaatttctaggaggcagtcaaggggcaccaggaatactctgtattttttatgagcctcttggactcccttggcaacaatttaaagcaggatttctcatacctgaaactagagtttttgttagattgtctattgctcttatgaggagtattattaccctatatggcataaattgatttcaactatatacatttgtgtatacatacacttatatgtattatagttaattttaggtaaatataaatttatatgatccattatgacttctcaaacatccttagtgttatttattcctccctccttctccttctgtattaactttcatgttccctctccaactaaagccctccatttttctatttatactttgaaaccacctctagcctggtatttctacctttagtgctcccataaccctgtgattacatttagtgtcctggctcttgtggtttctgcaggttaatatcctcatatccgaagatttgtcgttagggactacagatagcagagacattctgggtctgggttcattcactcaattacatcttctctattctattacttgaaaatgtcacgattgcatattttctataccgctgaataggattacagtacggatatgcaccagattttcgttatccattaattaatggaaaaatgttaggattgtttccacttcctagctgtagtatgtcatcttattctgaaagcccctttcccacacctgtatcccgtgggggtactgcctatgctttctattgcttttgaactcatctgaagttaaagttcatgcaaattggttgatattaattttgtttttctacatgtagacatactgtttttccagcactaattgttgattatgctatctttcctccagtaaatgttttgtttatatatttgttaagtatcagatggatgtagttacatgttcaagtgtttgggccttctgtttcattctgctggtctgcttttattttattttattttttgacagtaccacactgttcttattggcatagttttctaatttatcttgaaatctgaggtagtaatgccttcattattttatttcattccacatatatagcttttattatgctgaggtagattctcttcagtttttctgtctctggatttttatcctgtagacatgttggattttgtaaaaggtcgtttctgaatctactaagatgaccatgtgattttcctctttaagttcacttatatgatttattacattgattgccctacatgtgataaactatccttacatcactggtataaagccaacttgatcatagtagatgatctgtatttggttttcaaatattttactgaatatttttatatctatgctcataggggatattggtctttttcctttttctgttgactttacttggtttcatgtaaaagtagcataagcagttttgatctctctgtctctctctgtctctctctgtctctgtctctctctgtctctgtctctgtctctgtctctctctctctctctgtgtctctgtctctctctctctctctcctctctttctccagccttccctgcccctcactctggatacagtgactggctacagttctttcaatgtctggtagaattctagcatgaatccctctggtcataggctgtgtttaggagagttttttattactgtttcatcctgtttttattgatatgtttaggttgttgatcttcctctggtttaatggtttgagtgaatctagaaacttggctgtgtatttaaaaatttcaacataatggagtgcaggcttttaacgtattccactataacatggtgtttgttgtaatgtgcccctcctcctctgaatctgttaaactgggccagctcttcttttccagtagatgggctaagtaagggtctgtggatcttgcttttttttcccccctccaacaataggcttattagattctttaattcttgtgtgtgtggttttttgttttgttttgtttttgtttttttttttttatttttattttttcggtttttcgagacaggggtttctctgtgtagccctggctgtcctggaactcactttgtagaccaggctggccttgaactcagaaatctgcctgcctctgcctctcaagtgctgggattaaaggcgtgcaccaccacgcccagctagattctttaattattaatatcattcttctttgtttctatttcgttatgtttttgctctgttttttattacttcttgccatctactagatttgggtttgttcatacttgtttttccaaattcttgagttacatcattaagtcatttatttgtgctatttctgattttttaacgtaggcacttaaagctataaatttccctcctaggaatgcttttcatgtgtctagatagtctgctgtgttgtgttttcatttttatttagttccagggttttgtttttgtttttgtttttttaatttgtcttgatttcatttcttctctcacccatttgtcattcgtgataagttgtttaattttcgtgtgagtttgtgtacttagtagaactttattcttgattttaaattttattgcatttgttaagttgtgtgtgtgtgtgttctaggatctgttctattttagagaagcttccatgggcttcttagtagaatgtactttttttttttttttgagatttggatggactattctgtagatgtgtcaggtccatttgatctatggtataatttaaccttgatggttctttctttatttttttgtccagattaccagtctactggagaaagtacaatcacttactcttaatgtattttgtgttaatctgtgcctttaaattcaggagtttgctttataagaactagagtaccacaaagtttgatgtgtatatgcttaggattgtagtgtctttttgagtaatcattctcttaattagaatgaaatggttttttttaatctagtttgattaattttggtttgaagtctaatttttgaatattggaatattaaagtttttacttgtttgaagtcctctttttttctgttttttcactttaaggttgtgcacatttaaagcagatattcttgtagacaacaagaatgtagttttgtttcttcatccattaagttagcctgtgtctttttttttttgactgctaaggacataaatatttaaaattattattgaaagtgtttgttgataacattttattatttttttctatttgctgcatgtatttctagctgtattttgtgtttcaacaattgtattatcacttgtttttttttcttcagtctcatgtctatacttattcctctcttcaatctgaaatatcacttctgcagggcctgcttacatgtatgtatttcttttagcctgtttataccatgcacagtttttccttctctgtcatctgtggaggatgttttgctgggtacactaaactaagttggcacttgtgttcttttagaactcttaaagcttttaaattcctaacgataaaacagctgttattctgatgttggtttgtgtgtgtgtgtgtgtgtgtgtgtgtgtgtgtgtgtgtgtgtgtgtgtgtgtgtttgttttgttgcagctttcaataccctttctttttctttatatttattgttttaactgtaatatgacatgaggggcattctttttggtttggtgctcctgtgcttcttgtatctgtatgggtaccttgccttagaatgggaaagttttctctgactttgctgatgatgtgatttaagccattgacctggaatgcttctccttcatctgtgcctataatttgaagattggtctttttatgatatcccatagctcttaaactttcttttcctgtgtttatttctattttttataatcattgattttgtgtgatgtaaaacttctattttatttttgagtcttgttattttatcttctgcttgagttattctcctggcaagcctcctccacatctgagttttaaaactacaatattgaggttttcattttcatcttaatttcagcttgagttttattcaatattatctgtactgaatttgatgtttacaatcctacattgtctttgtcattttattcagccttatgattttggtttttggggcattgctcaggcatttattttctttaagttcatcatttaagtatattgggctatttgtgtcttctttaaagtccttgaggtttttttttcttctaattttttttgtgttctaggattgatctaggttattctcattggaaaacagttgtatttgagtggtggactttgtggaaagtatactgtcttggccttccatattgtatgtttgttttttcaatgtggcctgggcatgtggacttcttttgttggtgttgtgtctcctatgagtttctagactggcttgcacagaacagcatatccagtcactatgagcaaggctttagcttgggatgcggagggcagatgtggttctagggaagcataaggcttaaacctcacatagatgtgtgaccagagatatgtctggacactcagagggtgcatgtgagctagagttcagcaaacttacaaaactacacctcagcatatggtatgctctcaagggtaggcctggatatttgatgtggtaggagtaggtaagtgtcaggagagctgatcattcaggactggtttattggttaagagccaagcctagagcttgaagtaaagtgtagcaagactgatcagacagaattgtacagacaatgtgcaactattgctatgtatggatgttggaggcagggtgcaggtaaacaatggttcagggattttacttgattggagctaggcacaggatgtgggattcagtcatgaactggaagttagatgtgatgtggacaactggacagaagaggaaggagaacaaagctaggactacctcatatagttgcgacaaggtccttgtaggaggcagagctggggtaccatgagttgcaaagggtgggagaagtgtgagagtattatctatcatagataatagtgttacatccttacaggggaaccgtaatggaggaagaagggagaacataggttagtccacctgggtcttggctactcagttgctatagggtttttggtaggcaggggtagcaggcaggggtctgccaaaggaaaagagacaggctgagaggagggggtcctaaagaaggcagtagcaagaccagggagaccagaatggagaagagggagaagaatgcctttcctatgtaacatttttgacacttattaacttttaatagcctcatgttcatttttcttatacattgtcagataacttagtacatattggtaaaatattttctgtcctgtgtgagtgacataggactgatgagatggctcagcacataaaccacctgcgctgccagcttgacagtgtaagttctgttttagtagcataaacctaacgatctaagtctggaccttgtaactcacttaaaaggagagaatgaacctcttcactcctccacagacacccactgctactacattaaaaaaaccacaggtccatcattttatatttgtgtcacagattctactctttttacaaaatatttaaggcatttcacagagtatgttttgatcatattctcccctcatacaaatactcctggataaaaccctaactctattcaccaaacttcatgtccattctctcttcctcaaacaacatgaataacaacaactccaaagcgaaaattaaaattaaaaccaaacaaaatgggcagaggtgtgaagtaagattttttgttggccaagtattcactccattgaagaaaactgctttttctctatcccaacaagtatcaactgcaaatagtttcttggctaggggtgggaatttgtgcccacccttcccctttatgctggaatgtttgtctggctttaacttgtgtagatcttatagagagatctaactcctaatcacatattgctatcactcaaccctcatcagagaagcttcctcttgctgcagatagccgttagcacagagacccacaaggggacagtgtgcagagaatgagagattttgaaaaactcagcactaaactgggtgtccttatcaaaaccctttccttttaggctcagggatctatgcagaagaaaggcaaacagagtctaacaggcagagataatgcacacctgtttaaaggaacgaattttctatgcatagcagggctgatgctcttacaggttcacagagactctgccctttattatgaaagctctgggaaaaaatggaaagattctttttgagttccttaaatatcctgtcaggcaataagggaagacaacatttctgtgaatagaggtgcatggacctcatctagctatggattcaatgtgggctccacacactgtgatcactaataaagttctggggaagatgtgcaggcttcatccaactatgactacataaggtcagcatgcacactctcattaagagctaaggctttgtccttgcactcaactctttagttgagatgaaagagaaacctttaacctctttagcctctccatgaacagtgtttgttggtacctctttaaatagtttctaagtgtcttagttgttggcctgttaaaagcctgatttattgcttcctgctcagcttgactctctgcctcatccttccctatggtggagatccaagcataatgaggaacaagtgcaattcctgaatccagtcatcgctaaatctctagagaccttagtacaatgatgctttataggaaaaggcacaaacaaatggtaacaacaacaaaaataaagttaaaaatattttttataagtcccagaaacttaaagttttgtgaccataaaatcctgacagataagtagtaacagagtaggctgctcgcattcctacagagatctccagttatgggagtatttgttacgcatattttattaaaagggggactgctgccaaacaaatgttggttacttatcatgccctaccgtaagcaatttatagctattttacttttcctaaaacatggacaacttggaatgcagagggtaaacagttaactgcaactcggacctggaaggtgttaggattaaaatcagccttatatctcagtaaatcagtgatcagtgattgctgatcttccaggtacggcttcaagacgaaccctgccctacaatgccaatttgaatttttataatagactaaagcttccatgttttaatcttcaaaatgcaagcaaatgaatcagtttacgattgctgctgcagagacatgacattccacagctccagggtccataatcagccatctggaaagaagacaggaatggcaaggtccagacaattccttcagtagagagtggctccattttcctttgaaaccttaaagatatacagtagttttattgcaatagcttaagggtgtagctacatgctagagtttaggttatcattaaatttcatcctacaaattgaggtcagaaaaccaaaaaacaaacttacaaaaccccaagcacaaatcttttaaagctcataaactgagagctttgagacttgtaatccataccatggtccagctgagctctctacactgcagtttcctcaactgtgagaactataatactcttcatgatgttatgaggactagaaataatagaggcagattattttgtctggtgccaggtacacaaacatggatgtagttctgagatgcttgctagtctccagctgtctcataaggcctctgggcctggagctcagcagcatgtcactcactgagctgtgtggctaggaaccaagcaggggacaagtggtggctaatgcatagcttttggatctagactaggatttttgttgtagaatattcaagtgttcaaacactgtctatcatctatctatctatctatctatctatctatctatctatctatctattccacaagagtttatttatcttttcttgtatattgtaaaccattcttataaatggaatacatgtcttctatctttcatctctatcatctgatcatttaaatcgtcacttaaagtttcagagtatctcaaacatttattcagtttttccattaataatttatttattcattttacatcttgagtgcagctcctccacctcccactcctctcctcacatagcaccttccttctctacctttccctctctctccccctctccttcccatatcctctgataagtacaagaccaccccataccaactcaccctgacacatcaagtcactgcagggctaggtaagtatatcccctcccaccaaggccagacaaggcagcctcatttgaggagcaggacccacatgcaggaaatagattcagggacagcccctgttcctgttgttgtggaacccacatggaaccaagctgcacatctggtatatgtatggggttgtggggaggggaggcataggcaatggttagtggttcagtctctgggaacctgcaagtgtccagaatagttttgaggatatggtagccaatcaggaatgtgtgcttttctgtgagagcaggttgtaggccttgagaagaagataaagaaatttgatttaattttactgatatattagaaggagattcgagatagtatgtttttttcttcttttaaaataaaatttattaatgtatattcattatatgtagtgataggttttattaagaaattttactcctgtatattttgtactttgatcatatttacctctataccatctcctttcttctggttcccactacacacattccttttcttatagctcccttttactttgtgtgtgtatgtatgtatgtgtgcaatcaaaaaaggcaatatttgtctttttcaatttagcttttattgcttagtatgatggtcttcaatagcatccatttgcatgaaaatactatgatttcatttttataatagactaaaacatatatatatgaattttatgaaaaatataaatacctatgagttttatatgagatatttatcatattttctttgttcattcatgtgttgatagtctcctgaatggactaagagcgtagtagaggcaatataagtctttaaactttattttacttttaatttatgtatacatatatatataatccatctatctctctatctatgtatctacctatctattcatctatctatctatctatctatctatctatcatctatctatctatctatctataattgtgtatatgtttgtgtgtgtgtgtatgtgtacatgtgtgcacatgtgattttgattatatgaatttaggcatatgtaaagactggaacaggttgtgggatctcctggacctgggattacaggaggctataaattattcaacatgggtcctctgcaagagcaataaacatcttaacccaagagctatctcctcagccctgaggcaataggtcttaactcaaatgttgccactgtccaatgtgaagccacaaagatcagggttgtgatatagtaatatacaaataaaagttatcatgggaggggttctgccccagaacaattatacacactgtaacaaatgaccaaaaggaagaagtaccaggtttaaatggatgcagtttagcaaggggatggcaaatggaaattcttattaagatggcagtgcttctgtgttgagaactagaaatggaaatgggtatgagaaaggttaagtctcaaaatgagagtctaatatttctcccagagatataaaactcatgaaaatgaacttgttgcccagcttagtgagtccatgttaaaatacccaaaaaaattttgtaccttaattcatgatttcagaccttttggtgcatggttgattggttatgtcacatttaggctaacagcaaggcaatatactatggttgtggagcagaaaggtgttcagttcatggaggctaggaacaagaaagaggcaggactgggctggggtactaaaattctccctcccccctctcagtagatatacccccttttaatgcttcactgctcccaataaatgccacaggctacaaccaaagtttcaacacataggtctttggagaccatttctctaggtaatacatctgagtaagtgacagcaaggaacacttggatcatcaaaataatacaagaaaaaaaaactaaccaaagattagtaaaggcaaaacaatgagtatcatgggccttgcaggtagagaagttaaatcatgaagcactttgtgagaactctgtaaaaaatactttgatttgtgatggctatagacagttggagactgtaaaaaagtttattagtaactacatcaggtttcatggctactccaaggtagtgttatactggaaaagataacctttctataacataaatggtgctgtctgtttcagaatagtacttcctggatttgacacaattcaagaattaaatatttgagacaaactaattctcaaataaatttgcaatgtttatgaggttccacaggagctttttggttggactttcactcccctctgtcattttttttttttctgatcaaggcccaactgctgtaaagcagcagacttataaagacaaaaccgtaagtccaacccctagatgtgactgatgatataagccacctcatgccagcggctaatagcataggtttgcatttctcagcacaggtctctcttatcaggccaaaagcagaactcccaactcaggtggggaaatttcatcaattctgtggtagcaaaaatagctgatgtggcaactcctgctatgcaggtcagggcagaactaggccaattgtgcctgtcttaggctggcccatccttgtgggctcttacccatcattgactatccagtcaccaactgctgatcctgtccacatattattgagtctcatgtttcaactgagtaagccatacattcagctgtacttggtctgtgttcagaaattgatctctgagggccatcatgatattaatgaccttctgatgaaacacccgttgtctacactatatgttccacaggcactggatcaggagaaggaaacctaaaaccacccccaaccattaattaggacataagtaacaatccaagctggaccaaagagcttcttaatgttattccaaattttacctacaaaggaggaattcaggtctacaacattgacatgtatggaggaaagattagcaatggcctgggttgacttcagtgacaaattcagcaactcattattccattgtcctttgactaaagtagccaatctcagccattctaaagaactatttttaactgaaaatgggataaggcaaaataagtgatagcatgggtcacaatcaaatttcttcatcatcccaagggtttcaaccttttctgccaaaagtcaatagcaaaattggaggaagaggcagaagggcccacaaaacttcagtcatcatcattggaggttgcatcagatctctcaaaagcacttattatttggttcactttacccaaatgtcttctttccagggatacgttgttagagaatacataggctagagctaggaggaagcactctgctagcctgggtgtctgctctgaccctatcaggactactcgagtcacattctatggatgcttttctctaaacactcacagtgaggaaaactgaggaagcatggattccacagaagagaagaacatgtgtcaccttctttagattgtaaaacatcctgtttgtctgcacctaggtttgcagaagaagtgactgccaagtggctttgtctctttgaaggaagtgggatcccatatggaccaatcaacagcctgaaggatgtgttttcagaagcccaggtttgtactttttgaattttctagctgctatttttaaaaaaatccttattgtcttacataaagggacaataactgttgatctttaggcctaagtcacatgatgtaatattttactattggattaaaattgtttgtctgtctaacatataatcacaatttagaaccaactagctgtctacagtcatacttacaagtccataaaatcgagcatgcttaagatacataaaatgttcagagtcatgtgcttttattttctgaaaaagagaaatatagccaggggccagaactcagagataaccactgatagaaataaagatgacgtttcacagttactatcttctcagatcatattaaaacatattaagtcatacttggttcattcagagtcatgtaaatcttcaaaatataagggaactttattttttatctgtaaggattttattaagacttaggtatcttaacaatttctaacatttacaaaattatgtgatatcattttttgagttatttatctatatatagtagaagtttttaaatttgaatgaattctcttgaataacacatactttcctaaaggagaaaaatgttggaaaatcaatctctttaacatcagtgcctttatttagtataaatgttcacttaaaagcaaatgtgaatgcatttagtttagaaaccacagtacttactagagtaaaaaataaatttaggaatttttatgttttctttcatttttattattttttatatcccatattttattattcccccacccaccctttcactgttccatatcccatatacctcctacctgcccacgtgtcttcatgtgaatgtccctacccctcaccccacctgacctctaaactccctggggactccagtctcttgagggttaggtgcatcatctcggaatgaacacagacctggcagtcctttactgtatttgtgttgggggcctcctatcagctgatgtatgctgcctgtttggtggttcaatgtttgagatatctcgggggtcctgattgagactgcttgacctcctacaggatcgcccttctcttcagcttctattcagctttccctaactcaacaacaggggtcagctgcttctgtccattgattgggtgcaggtatatacatctgattctttcagctacttgttaggtcttttggagggcagtcatgataggtccctttttgtgagtgctccatagtctcagtaatggtgtcaggtcttgccacctcccctagagctggttcttactttgggcctgttgctggaccttcttttcctcaggctcctcttcatttccatccccataattctttcagacagtaacaattatggttcagagttgtgactatgagatggcaaccccaccgctcactcaatgtcctgtcttcctactggaggtgagctctataagttccctctcccttctgtcaggcatttcatttaaggtccctcattttgagtcctgagtctctcacctcccaggtctctggtgcataatggagggtccccccaacctcctttcttctgaggttgcctatttccattctttctgctggccctcagggcttcagtccttttccctcacccaataccagatcatgttcccctgtcccccataattccccccatccactttctcttccagttctttccctccctccccacttctaatagctttcttctctctcccaagtgggactgaggcatcctcacttgggcacttcagcttgttgaactttttgagttctgtggattgtatcttgggtattctgaactccacaacaccttgactaatatccacatattagtgagtacatactatgcatgtcttttgaggtctgtgttatctcactcaggatgatatttgctagttccatccatttacctgcaaaactcaggatgtcctcattcttaatagctgagtagtattccattgtgtaaatgaaccacatttcctgtatccattcttttgttgtgggacatctgggttgtttccagcttctgactatcacaaataaggccactatgaacataatggaacatgtgctcctgtggcatggtggggcatcttttgagtatatccccaagagtgctgtagctgggtctttaggtagatctatttccaattttctatgaaaacctccagattgatttccagagtggttgtaccagtttgcaatcccaccaccaatggagaagtattcctctttctctatatcctctccaatatgtattgtcacctgagcatttgatattagtcactgatttgtgtaaggtggaatctcagggtcgttttgatttgcattactctgatcactaaggaatttgaacatttctttaggtgcttctcagccattcaagattcctctgttgtgcattctcagtttagttatataccccatttttgattggattggttttttttttgttgttgttgttactaacttcttgagttctttatatattttggatattagccctttattggatgtggggttagtgaagatattttcccaacctgtaggttgccaatttgtattattgaatgtttttttgacttacagaagcattctagtttcatgaggccccatttatcaattcttgatcttatagtatgagccattggagttcatttaaggaactttccccctgtgccaatgagttcaaggcccttccctactttctcttctatttgattcagcatatttggttttatgttgaggtccttgatccacttggaattgagttttgtgcaaggtgacaaatgtgggtctattttcattcttctacatagagacagccagttagacaggcaccatttgttgaagatgctttcttttttccattgtatatttttggagtctttgccaaagatcaggtgactgtaagtgtgtctctgtaccaataccatggagtttgttgtggttgttgttgttttgttttgttttgatcactattgctctgtagtaaagcttgaggtcagggatggtgattcccctggccattcttttatacttaagaattgttttcactgttctgggttttttgcctttccagatgaatttcagaatttctatttccatgtctttgaagaactgtgttgggattttgatggggattacattgaatctacagattgcctttggtagaatggccatttttactatgttaattctgccaatccatgagcataggagatctcttcattttctgagatcttcttcaatttctttcttgagagactcgaagttattgtcatacaggtctttaattgtttggttagagttaccccaaggtatttaaattatttgtggctattgtgaagggagttgtttcctttatttctttctcggcctgtttatcatttgtataaaggaaggctactgatttatttgagttaattttatatctgacactttgctgaggttgtgtatcagctggagatgttctctggtagaattttgggggtctcttatgtatactatcatatcatctgcagatagtgatacctttatttcttctttaccaatttgcatccccttgatctctttttgttgtcttattgttctagctaatactttgagtactatattgaatagatatggggagagtggccatccttgtcttgtccccaatttcagtggaattgcttcaagtatgtctccatttaatttgatattagctgttggtttgcagtaaattgcttttattatgtttaggtatggtccttgaattcctgattcccttcaatacttttaacatgaaggagtattgtatttcatcaaatgctttttctgcatctaaggagataatcatgtgattttttttctttgagtttgtttatatagtggattttgttaagattttcatatattaaaccaaccttgagtttaaacaaaccttgagtttgatattaagtgggtatggggtgtctagtgtgagtaagcagtcagggatcccaaaatatcagggaatcatgcctgctgactcttggagagaggtggctatgtgcacacctgcctgtgaaccacgatgctggtttgctcactttatgtcttcaactagcactttatggtggtgttgtaagatgtgtagaacttccagtttatatgaacttagggtatatttttctagagaatttattcatcaacatttttgttgttcaatgaatatcttaccagaaacaaagttgccaaagcaaatgtaaatttctgcaacattaattttacaatattttctagttttaggttttatttttattttttaaaattctacctactatcacacagttgttcaagtgatggtcttatgagttaatataagttcattcatactttcataactaattgaaccttgtattctcacttaatcatgacaagtaaaagttacttttatgaatgatgtataataattgtcattgcaaagtaattgttgtggaatgcaaattttttgtttttagtctatggcatttattagttagtatgctatttatcaatggagaagattattatttgtcacatatcatcttatatcaccttgaaagactttacaaacggccctcttgcccaccaaaagtagtctaattgtagttctatcatcataaatatttaattatactctgattgaaattgataattgaactttagaaggaaaaagttgtcttctttattcacaatcaaatctttctttgcaatttaaatatgaaatatatatttgcaacttctctagatttttgtaaacactaggaagaagtatgctctaaacattacagaaataatcaaagatgactgttaaattttcaaatgttctagtttggtctatgcaagagatgaactgtcttcttccccttgtacttgaagtatttgtcctctccaaattttgaatttggggaatcttatacaatgttgggaaaaatcagagataaaaagtgtatgagatacattaaaatacccactaaatgtgatgtgtaaaattatccagtcagccaccctgttggctcactcctagcactctggaggttgagtcaggtagaatgtcatgagttcaaggcctccttggactacatacaagtttcagtactgttgtggtatctcaaaagctaaaaatataaaaacataaattaccatttaaaagagtttttcacttattcagttgccttattgtatttaataggtatcaaatgctagggatttagtataaatttatttctttgtatttctgaaaaacaaattaaaattgaatgatatagcaggcatgttataatatttgtagattcatgaatcatcaaatgaaaatttagcttactttggggagtacaggtttcctaaagtttaaagtggttcctttgtgcctctgaaaatgaactgaccaaccttatttttaggattagtagtactgattttgatgacttcaggaactgagtgtaaaatagtgggcaagtgtcagatttgctacatttattaacattctaaagtaaacatttttctcaatgtcaaatattaaaatagagttttatctctctattggcagcattagatgagatgcagcagagaggagtataggttaggctagacagtaactcggtgtaatcgcagctttcattataatggtacctgtggtggtttgagtgagaatggtccctatagattcatttgcttgaaagcttgttcccagttggtggaactgttggggaaggattatggttgtggccttattggagcaggtctgttgctgggagtggctttgagatttgaacacacacatccattatcagctgggtctctctacctcatgcttatagatcaagatgtaagctgttagctactgctctgagctatgcttgcctccctgatgccatgctccccattctctgaaactgtaaccaacaaataaactctctattctacaagttgtgttggtcatgttgccttaccacagcaccagaaaagtatttgagatggtgccgtttagactttattgttacagatacatctgctttacctatgtttatgaacagagtcacatccattctagccataaagataattcactaaagtcatgctttcctatctttttataaaaatgtgttcacaaactctttggcaaaagtgctcagccctgcctcatctgattggcaatcctctatcattttttaattctccataggaaatattttttttgaagtatgatttctgtttgaagtatcctcctattttttccctcttatgaattacagagtttcttggccctaggtataagaaactggccactttctttcagatgtgggaagggccactgattctgtggccctatgccccatgtatcctgtgccagcacagctgcttgctcaattagaaatcacgttgggcgatgcacaaggcctggaacaacgcacaggaaggaagtccctgatgaggtgaaaaaggctatgtccaactatggaggtgggaaagggagactggaaattcaaagaattaaaaaaaaaaaaagagttttgtgtgccacttaccttccacctgtggttggaagtacttggtagaaaatgaaattttactttatggttttaaaaaagaactatttctaacccaacgattttatattctcttttataaaagaagacttgacttcatctcaactgaaagcaacatatatgctttttattggctagatagaagattgtctacgttttactcctctgcttaaatgatctgatctttgaatgattcaagtggcccctgtgaatagctgctgttaatcacaaatacctcaggggttttgcctaaatgtaccaattgttctgagatgttttcatgcaaaactcttgaagtgatagttttattgttttcctcccccaacgacaaattatctgagggaagctcaatgcattacaaagtataatatagattatctacatgtagattttaatagcttctttcccaagtgctttcttaaaatatcttttttattaatcagaccaagattgtgcagtacattaaaggaattcttaaaacgtttcaacagcttactagatgacctcagcatggtcctatgaatatacccttgggaacatgtgcatgagacacactgtggtttgagggtttccaactcaaacaaacttaaaagaaaatgagcttttaatagaaactattcaaattcctgcaacacaaggtatggatcctaccacagagaacattttaaagcactgttatctacaatgagcatcaaggagcactccaggctgtctcaggacttcccagaagactgtatctggtcaatattgtcatcttattctcaactgtgaatgattagagcacccatgttttatgctgttctttgtccttgatgttatgacctgatggaggggaagaagggcaaagggtgtcacaaatgggtatgatttaccataattttccatttgtaccacacaagttgaatatgtcaggtgtaagacatcaccaggaagcatcacttctgagaaatattatgagggaaacatcagaattattgaaatatcacagctggccctgattttaactggagccaaacacctgcagcattaacaggaaccaaaacaaaaccccaccctatggcgatgtgccatttcttaacagccgtctctaactttgcatcccatcaaaattagttttaacatttcctacaggaatcttattcttgtcccaaaaggccattacaactccttttgtaactatttcatatgggacaaatgtatcatggaaacaaagtgaagtactgaaatacttgatggctgaaaactgttgttttcatcccattatttgtgaaagcctgtgaagctagtggttttattaatttcaaggctagcttacattctcttaagtgattttgtttcagcacaatttggcaacatttctgagcatctgagaaaaaaggcctttgatattcatatagtaagcatcagtagaactgcaaagtccatggctatcttttgcagacagaccaacagacggatggacagacagaaagacagacagacagacacacacacacacacacacacacacacacacacacactcattcacttaacaatgatgctacacattatctttcttttttccacaaacacacatacacatacacacacacacacacacacacacacacacacacacaaccctgtggatcattccagtgttgtctgaggtatatttcaacaatacagtaatatcactagtacagtttcttttgttgttgttgtagttttgttttttgttttattaggtattttcttcatttacatttccaatgctatcccaaaagtcctccataccccccccccgactcccctacccacccattcccacatcttggccctggtattcccctctcctgaggcatataaagttgcaagaccaatgggcctcactttccactgatgccctactaggccatcttctgatacatatgcagctagagacatgagatccggggagtactagttagttcatattgttgttccacctatagggttgcagatccctttagctccatgggtactttctttagctcctccattggggccctgtgatccatccaataactgactgtgagcatccacttatgtgtttgctaggccccggcatagcctcacaagagacagctatatcagggtcctttcagcaaaatcttgctagtgtatgcaaatcatgtcagcatttggaagctgattatgggatggatccctggatatggcagtctctagatggtccatcctttcctcacagctccaaactttgtctctgtaactccttccatgggtgttttctttccaattctaagaaggggcaaagtgtccactctttggtcttctttcttcttgagtttcacatgttttgcaaattgtatcttatatcttgggtagtctaaggttctgcctaatatccacttatcagtgagtatatatcatgtgagttcttttgtgattgggttacctcagtcaggatgatgccctccaggtccatccatttgcctaggaatttcataaattcattctttttaatagcagagtagtactccattgtgtaaattaccacattttctgtatccattcctctgttgagggacatccaggttctttccagcttctggctattgtaaataaggctgctatgaacatagtggagcatgtgtccttcttaccagttggaatatcttctggaaatattaccaggagaggtaatgcgggatcctccagtagtactatgtccaaatttctgaggaaccgccagactgatttccagagtggttgtacaagcttgcaatcccaccaacaatggaggagtgttcctctttctccacattcacgccagcatctgctgttacctgaatttttgatcttagccattctgactggtgtgaggtggaatctcagggttgttttgatttgcatttccctgatgattaaggatgttgaacattttttcaggtgcttctcagccatttggtattcctcaggtgagaattctttgtttagctctgagccccatttttaaatggggttatttgattttctggagtgtaccttcttgagttctttatacatattggatattagtcccctatctgatttaggataggtaaagatcctttcccaatctgttggtggtctttttgtcttattgacggtgtcttttgccttgcagaagctttgcagtttcatgaggtcccatttggcaattctcgatcttacagcgcaagctattgctgttctattcaagatttttttcccctatgcccatatcttcaaggctttaacccactttctcctttataagttacactgtctctggttttatgtggagttctttgatccagttagatttgaccttagtacaaggagataggtatggatcaatttgcattcttctacatgataaacgccagttgtgccagcatcgttttttgaaaatgttatcttttttacacttgatggttttagctcccttgtcaaagatcaagtgaccataggtgtgtgggttcatttctgggtcttcaattctattccattggtctacttgtctgttgctataccagtaccatgcagtttttatcacaattgctctgtagtacagctttaggtcaggcatcatgaatccaccagaggttcttttatccttgagaagagcttttgctatcctaggttttttgttattccagatgaatttgcagattattcttaccaattcgttgaagaattgagttggaattttgatggagattgcattgaatctgtagatagcttttggcaagatagccatttttactatactgattctgccaatccatgagcatgggagatctttccatcttctgagatcttctttaatttctttcttcagagacttgaggttcttatcatacagatctttcacttccttagctagagtcaagccaaggaatttcatattattagtgactattagggacggtatgggggacgtttgggatagcattggaaatataaatgaggaaaatacctaataaaaagaatttttaaaaagagggtgtcattttcctaatttctttctcagcctgtttatcctttgtgtagagaaaggccattgacttgtttgagttaattttatatccagctacttcattgaagctgtttatcagatttaggagttctctggtagaatttttagggtcactcatatcatatcatctgcaaatggtgatattttgacttcttcctttccaatttgtatcccttttatcttcttttgttgtctaattgctctggctaggaattcaagtacaatgttgaataggtagggagaaagtgggcagtcttgtctagtccctgattttagtgggattgcttccagcttctcaccatttattttgatgttggctactggtttgctgttgattgcttttatcatgttaaggtatgagacttgaatttctgatctttccaagacttttatcatgaatgggtgttggattttgttaaatgctttctctgcatctaacgagatgatcatattgtttttgtctttgagtttgtttttatagtggtttatgttgatggatttccttatattaaaccatccctgcatccctggaatgaaacctacttggtcaggatggatgactgttttgatgtgttcttggattaagttagcgagaattttattgagtatttttgtatctatatacataaaggaaattggtctgaagtactctatctttgttgggtctttatgtggtttaggtatcagagttattgtggcttcatagaatgaatcggttagagtaacttctgcttctattttgtggaatagtttgtgaagaactggaattagatcttctttgaaggtctgatagaactctgcactaaacctgtctggtcctgggctttttctggttgggagactattaatgactgcttctattcctttaggcaatataggactgtttagatcattaacctgatcctgattttactttggtacatggtatctgtctagaaatttgtccatttcatcaaggttttccagttttgttgagtatagccttttgtagaaggatctgatggtgttttggatttcttcagaatctgttgttatgtctcccttttcatttctgattttgttaattaggatgctttccctgtgccctctagtgagtctggctaagggtttatctatcttgttgattttctcaaagaaccagctcctcatttggttgattctttgaatagttcttcttgtttccacttggttgatttttgcccctgagtttgattatttcctgctgtctactcctcttgggtgaatttgcttccttttgttctagagcttttaggtatgttgtcaagctgctaatgtgtgctttctctagtttctttttggaggcactcagagctatgagttttcctcttagaaatgctttcattgtgtcccataagtttgagtatggtgtggcttcattttaattaaactcaaaaagtccttaatttctttctttattccttccttgaccaagatatcattgagaagagtgttattcatttcccacgtgaatgttggctttacattatttatgttgttattgaagatcagccttagtccatggtggtctgataggatgcatgggaaattttcaatatttttgtatctgttgaggcctgttttgtgaccaattatatggtcaattttggagaaggtactatgtggttctgagaagaaggtatatcgttttgttttaggataaaatgttttgtagatatctgttaagaccatttgtttcatcacttcttttagttttactgtttccctgtttagtttctgttttcacaatctgtccattgatgaaagtggtgcgttgaagtcacccactattattgtgtgaggtgcaatatgtgctttgagctttactaaagtttctttaatgaatgtggttgcccttgcatttggagcatagatattcagagttgagagttccttttggaagattttacctttgatgagtatgaagtatccctccttgtcttttttgataacttttgaagtcgattttattcgatattaaaatgactacttcagcttgtttcttcagaccatttgcttggaaaatggttttcctgcctttcattttgaggtagtgtctgtctttttccctgagatgagtttcctgtaagcagcagaaagttgggtcctgtttgtgtagccagtctgttagtctatgtctttttattggggagtagagcccattgatattaagagatattaaggaaaggtaattgctgcttcctgttattcttgttgttaaatttggcattctgttcttgtagctatcttcgtttaggtttgttgaagaactactttcttgctttttctaggatgtgttttctgtccttgtattggtttttttctgttaatatcctttgaagggctggatttgtggaaagataatgtgtgaatttggtttgtcgtggaatactttggtttctccatctatggtaattgaaagtttgtctgggtatagtagcctgggctagcatttttgttctcttagtgtctgtataacatctgttcaggatcttctggctttaatagtctcttgtgaaaaatctggtgtagtctgataggcctgcctttatatgttacttgaccttttccccttactgcttttaataatctctctttatttagtgcatttgttgttctgattattatgtgtcgggaggaatttcttttctggtccagtctatttggagttctgtgtgcttcttgtatgatcatgggcatctctttctttatgtttgggatgttttcttctataattttgtcgaagatatttgctgaccctttaagttgaaaatcttcattctcatctactcctattatccgtaggtttggtcttctcattttttcctggatttcctggatgttttaagttaggatctttttgcattttgcattttctttgaatgttgtgcagatgttctctatggaatcttctgcacctgagattctctcttccatttcttgtattctgttgctgatgctcacatctatggttccagatctctttcctagtgtttctatctccagctttgcctcactttgggttttctttattgtgtctacttccatttttaggtctcgtatggtttattcatttccatcagctgtttggatgtgttttcttgtttttttttaaggacttctacctgtttggttgtgttttcctgttttcctttaaggacttgtaactctttagcagtgttctcctgtatttctttaagtgagttattaaagtccttctttttttttttttttttttttgaccaatcatgagtctctttattaaatactaccaatcaaaaagaaatttcttgattaaggttgggactagcataaatgatgtataaaatataaatattaagaaactagtttgtcaacatgtccatttattaaatcaaccagtatcttccatctaggggtcatatttccccacttatgatattttaccaggtttccaatgcttaatctgaaacccttccataaagtggttggttacctccataaccatgtcctctaccatcatcatgagatatgcttttaaatccacgtctcccttttcgggtgtgttggggtgcccaggactggctgagttgggaatgctgggttctgatgataatgagtggtcttggtttctgttcgtaagaatcttatgtttgccttttgccatctggtaatctctggagttagttgttacagttgtctctggttacagctttttcctctctggattgttagcttttatcaacagacctgggagactagctttctcatgagtttcagtggttgagcattctctgcaggcaagctctcctcttgcagggaaggtgcacagatatctggtgttcggacttgcttcctggcagaagatgaagatctgtaacagggcctgtcacagaagctgttagcttctgtagtccacactctcacctgtgcagactagtcttggtgggatccaggaaacaagatggctcccccaggtgttccggacacacattatctttcaatgatgtaattagtgaatttgctggggcttctgggagttatatagggctcatatcattgtctaatactgtagggaaatgcatagcctctatctataaactgtaatttttataacaagaaaactgttgatgaagttctgagtaaaatagtttgtctggaaatagttcctagcagacaaggatgagatgaaaaatataatttgcaaatattatttgttttgtgatttgtaagaattttatatgttattggatttatggtagttaggcacaatatacccaacttctgaagaaatgatacatttcaaatttaggcaaataaccaaaattagaatttgttttcttctaatatattgaatgtaagaaataacatctaattgtattttttgaatagaagaatctcaagattaatatttttgtgttgcaatttgggaaaaaaaaccttagtaaaatgttcaaataatattattttcatagcaaagatgttttgatacattctaacaagacattagcttgtttggtccatcatactgatttgtgcatagatagctactggagtgccttggatgccatgtgactgatcccttaaacaagtctaaaaatcatgctataggcccacaggaaatcacagagactcatcattcatctaggcaaataggaatgggtggcttgctatggtaaggaacagtggaggacatcaaataaagaggatacaatgtcaagcaggaggttgcagattgcttcctgtagaaagtggtctgtgccatagaagcattgtaattaaataaatgttgagtatctgaatcgccagagatgacacacagaagccactgtgaggtttccaatttagtgatttatcactagtttaaaatataacaaagaggtacaaaatgtctctatcatgaaatttgccaaagaattctcatccctttaaatgctccttgtacgttgttaatcacattgtcattgatgttttccctcagtgattaggaagatgacagtatagggcttcagactttactatttagtaaatttaacatatccaagatctgaggacctgagttttttaggtgtcttgtaaagtgatttcctctgtttctcgttgacactctgtctcttcctggtgagtctgcacagcatgcatctaatttctgagttccaattataaaaactacattttatgagtattctcacactatttcagagtagactttcattcactacattctcattgacttttgcagatttttatcttcccatccagagacagtctgggttttggtgggtacatgctgaaaataaggaaagattaattagtattttcagtatatattttgagacccagaatgaagagcatgctaataagtataaataacactgaaatattttcattgaggtatttaagtattcatagtctttggacccaattgtgcattttatccttgcaggaatagcaagccagtctcactttaagtgcctaggagccacaagtggctggctgtaatgtaggtggcatccatatatatgtttgaagaattatctaggatttattcccagttttgcatggcttgtagattgtaattactttagtttttattagtaactcccaaatcaattaaaagtttaagtcttaagcatttccttatgtgaaagctctatttaatagcaatgtatctgtatttcctcacttccttttgagtgtttattttcaagtgaacttcaactcttttatagttcaaaaggaaaagcttttgcttaaatgacttttgttgcaacgtgagtagataataactgatcaactcagtcttctgatacattgttagatttggggccttccttcctgctgctgactgctttgagggagagcaaaagtaaactggaaagctggttgaggaagttgtaacacttgcttgaaagccagaagaaagcttgcaaagaatgtaaagacatggtcactcacagctgaggagacaatactcctagatcagttataactctactatcattgcaatgaaagcctcggtggatatctttcaacttgcttatgaagtttttgtctgggctacctggacaaataaatggacaagaatagcaaacatttgcctggtgaatagttcattaggtaaaaggtacttgttatcaaatctgatgacaaaattaaatccccatgactcataagatggattgaaagaattgagtccctcgagtttttctttgatgtttttacatgtgccagggcttgcatttgcacatgtatacacttataacaaacaagcaaatgtaatgaaattaagagaaataataaatattatataggtctaaaagttgtatgtaaaatatgcaagccactagaaggacacatgtgttagtatattgtgccagagagtgttatgacaacttgacgcaagctaaagtcatctgagaggaggaaacctcaagaaaatgcctcattaagatgtgccccttcttagaattgggaacaaaatatccatggaaggagttacagagacaaagtttggagctgtgaggaaaggatggaccatctagagactgccttatctagggatccaccccataattagcttccaaatgctgacaccactgcatacactagcaagattttgctgaaaggacccagatatagctgtctcttgtgaaactaggcaggggcctagcaaacacataagtggatgctcacagtcagctattggatggatcatagggcccccaatggaggagctagagaaaatatccaaggagctaaagagatctgcaaccctgtaggtgcaacaacattatgaactaaccagtaccccggatctcatgtctctagctacatatgtatcaaaagatggcctagtcggccatcactggaaagagaggcccatcggacacacaaactttatatgacccagtacaggggaacaccagggccaaaaaaaatgagaatgggtgggtagggaagtgggggggagggtatgggggacttttgggatagcattggaaatgtcattgaggaaaatacgtaataaaaaaaaaaagatttgcctatagaaaaaaaaaaacagatttgcctatagagcagtctgtaggtcattttcttaattagtgatttatgggggagggtccagtccattcccggtggtgccatcctttggctggttgtcctgggttctataagaaggtaggctgaacaaaccattatgagtaagacagtaagcagtactccttcatggcctctacatcagcccatgtctccaggttcctgcccatttttagttcttctgctaagttcttcagtgtggactacaatgtgcaagggtaatacaaataaaccatttcttccccaatatttgcttttagcatggtatttcaatgtagcaataatgatcttaatgaaggcatatatgtctatatgtacatatatgtatatttgtatatatgtatatttgtatagtgataccacaataactaagacattgtcctagtagacaatggaggaataaattatggaacatgaagggaaggaaaataaaaaatatatttcacagatttgttagggtatagaaataaaatagcacggagacaaagagagattgattttactcaaagaaatgagcagtatatttattggtcatggtttaggcctaataaggaataaaagccttaggatttgctttaaattgaaataaactttttatgttttcttttcttctattttgaaattaaaatataattacataattgtctccttccctttcctcccttcaccctctattatgtttccccttgctgtttctcagattcatagcctcttttaaaaagtactgtaataatatatgatactaaaatgtatattattaaatatataaattttttaaaaatccagtctatctgaaacctatatgagtatgatttcagggctggccacctggtgttggaaaaccaatagctgttcccttccctggagagactgatacttacaatctctgcattcctaattgcctcaagtcctttgtctaggcttgaggtttcatgaaatttccccttcctatatccttccatgttagtacacagattgttgtcatctctgggcaggtcttatttagcagacatattgttgagacatcatgagtgtttagaatatcttggatttttctgatcaataactggaaagggagcttctcatctgctgttggagatgtgatacttgtcgttctgagtctgagttagcatgatcttccctagctctatctgtttaccctctgagttcatggttttatttttcttgacagctggatcttattccatgatgtataggcaccacagttttattatccatccatcagttgaaggacagttagaataattgtaaaattattttaagctgatactattaataagaaacagattttgagaaaaagaaaggctacacaaagtgataaacactggcacaaaaaaaattgacaaacttgataaacagaagtaaggacatgcactgtactagtgggaatgataggaagggagatagcagaacaggagaatgctcttgcaacaaagatcttggaaaggtgttggtcagaagcagcaagacattagtgatgacagaaattagtaaaaactcaaaaaaaaatagacaaaagactaaagacctggttagataatccagaaaatccacataagtgagaaacatacaagtataactcagtgttcacaatgaagaatagtgattcatgatcaaatgccaagtttactttttctttccaacactgaaaaaaatgtgtatatttcacacctgtgtatgtttacatgcatacatacggatacagatcacactttaacctaggaatagataggacaagtgagaactattttctggtgcacactttatggaaccagttttattaatacatatcaagtactttaaatggtctgtgatctgtactctgactcttcctggactgctacacaattaatctcagagggatcaaaatccatcctgtaaaatgcatatcatgtttgccagctgtaaggtaaaaataatataaatgtatagctatagatacactgattaaataatataataaaatataatgctgtacatgacacactgcctttaagatatatttttaaagaacaacatgaaaaacatttattcatagattaaaaagcaggatacaggagccccggggtatcttgccagcggagtcgcccgacacccgcaagggcccacacaggattccccacaggatcctaagacctctggtgagtggaacacagtgtctgccccaatccaatcgcgcggaacctgagactgcagtaaatagggaagcagactacccgggcctgacttggggcacaagttccttccactccactcgagcaccggggtaccttgctagcagagtcgcctgacacccgcaagggcccacacaggattccacacgggatcctaagacctctagtgagtggaacacaacttctgccaggagtccggttggaacaccaggtatctgggtaccttccctgcaagaagagagcttgcctgcagagaatactctgcccaaagaaactgaggagagtgctaccctcccaggtctgcttatagaggctaacagagtcacctgaagaacaagctcttaacagagacaactataacagctagcttcagagattaccagatggcgaaaggcaaacgtaagaatcctactaacagaaatcaagaccactcaccatcatcagaacgcagcactcccaccccacctagtcctgggcaccccaacacaaccgaaaatctagacccagatttgaaaacatttctcatgatgatgatagaggacatcaagaaggactttcataagtcacttaaagaattacaggagagcactgctaaagagttacaggcccttaaagaaaagtaggaaaacacaaccaaacaggtagaagtccttaaagaaaaacaggaaaacacatccaaacaggtgatggaaatgaacaaaaccatactagaactaaaaagggaagtagacacaataaagaaaacccaaagagaggcaacgctggagatagaaaccctaggaaagagatctggaaccatagatgcgagcatcaacaacagaatacaagaaatggaagagagaatctcaggtgcagaagattccatagagaacatcgacacaacagtcaaagaaaatacaaaatgcaaaaggatcctaactcaaaacatccaggaaatccaggacacaatgagaagaccaaacctacggataataggaattgatgagaatgaagattttcaaattaaagggccagctaatatcttcaacaaaataattgaagaaaacttcccaaacataaagaaagagatgcccatgatcatacaagaagcctacagaactccaaatagactggaccagaaaagaaattcctcccgacacataataaacagaacaacaaatacactaaataaagatagaatattaaaagcagtaagggagaaaggtcaagtaacatataaaggaaggcctatcagaattacaccagacttttcaccagagactatgaaagccagaagagcctggacagatgttatacagacactaagagaacacaaatgccagcccaggctactatacccggccaaactctcaattaccatagatggagaaaccaaagtattccacgacaaaaacaaattcacacattatctttccacgaatccagcccttcaaaggataataacagaaaagcaagcaatacaaggacggaaatcacgccctagaacaagcaagaaagtaatgcctcaacaaaacaaaaagaagacagccacaagtaacagaatgccaactctaacaacaaaaataaaaggaagcaacaattacttttccttaaaaaagaagacagccacaagaaacagaatgccaactctaacaacaaaaataaaaggaagcaacaattacttttccttaatatctcttaatatcaatggactcaattccccaataaaaagaaatagactaacagactagctacacaaacaggacccaacattctgctgcttacaggaaacccatctcagggaaaaagacagacactacctcagagtgaaaggctggaaaacaattttcccagcaaatggtctgaagaaacaagctggagtagccattctaatatcggataaaatcaacttccaacccaaagttatcaaaaaagacaaggagggacacttcatactcatcaaaggtaaaatactccaagaggaactctcaattctgaatatctacgctccaaatgcaagggcagccacattcattaaagacactttagaaaagctcaaagcacacattgcacctcacacaataatagtgggagacttcaacacaccactttcttcaaaggacagatcgtggaaacagaaactaaacagggacacagtgaaactaacagaagttatgaaacaaatggacctgacagatatctacagaacattttatcctaaaacaaaaggatataccttcttctcagcacctcacgggaccttctccaaaattgaccatataattggtcacaaaacaggcctcaacagatacaaaaatattgaaattatcccatgtatcctatcagaccaccatggcctaagactgatcttcaataacaacataaataatggaaagccaacattcacgtggaaactgaacaacactcttctcaatgataccttggtcaaggaaggaataaagaaagaaattaaagactttttagagtttaatgaaaatgaagccacaacatacccaaacctatgggacacaatgaaagcatttctaagagggaaactcatagctctgagtgcctccaagaagaaaagggagagagcacatactagcagcttgacaacacctctaaaagctctagaaaaaaaggaagcaaattcagccaggaggagtagacagcaggaaataatcaaactcaagggtgaaatcaaccaagtggaaacaagaagaattattcaaagaattaaccaaacaaggagttggttctttgagaaaatcaataagatagataaacccttagctagactcactaaagggcacagggacaaaatcctaattaacaaaattagaaatgaaaagggagacataacaacagatcctgaagaaatccaaaacaccatcagatccttctacaaaaggctatactcaacaaaactggaaaacctggactaaatggacaaatttcttgacagataccaggtaccaaagttgaatcaggatctagttgaccatctaaacagtcccatatcccctaaagaaatagaagcagttattaatagtctcccagacaaaaaaagcccaggaccagacaggtttagtgcagatttctatcagaccttcaaagaagatctaattccagttctgcacaaactatttcacaaaatagaagtagaaggtactctacccaactcattttatgaagccactattactctgatacctaaaccacagaaagacccaacaaagatagagaacttcagaccaatttctcttatgaatatcaatgcaaaaatcctcaataaaattctcactaaccgaatccaagaacacattaaagcaatcatccatcctgaccaagtaggtttatttccagggatgcagggatggtttaatatatgaaaatccatcaatgtaatccattatataaacaaactcaaagacaaaaaccacatgatcatctcattagatgcagaaaaagcatttgataagatccaacacccattcgtgataaaagttttggaaagatcaggaatgcaaggcccatacctaaacatgataaaagcaatctacagcaaaccagtagccagcatcaaagtaaatggagagaagctggaagcaatcccactaaaatcagggactagacaaggctgtccactttctccctaccttttcaacatagtacttgaagtattagccagagcaattcgacaacaaaaggagatcaaggggatacaaattggaaaagaggaagtcaaaatatcactttttgcagatgatatgatagtatatataagtgaccctaaaaattccaccagagaactcctaaacctgataaacagctttggtgaagtagctggatataaaattaactcaaacaagtcaatggcctttctctacacaaagtataaacaggctgagaaagaaattagggaaacaagactataataatataaaatatcttggcgtgactctaactaaggaagtgaaagatctgtatgataagaacttcaagtctctgaagaaagaaattaaagaagatctcagaagatggaaagatctcccatgctcatggattggcaggatcaacattgtaaaaatggctatcttgccaaaagcaatctacagattcaatgcaatccccatcaaaattccaactcaattcttcaacaaattagaaagggcaatcggcaggttcatctggaataacaaaaaacctaggatagcaaaaaatcttctcaaggataaaagaacctctggtggaatcaccatgtcggacctaaagctgtactacagagcaattgtgataaaaactgcatggtattggtatagtgacagacaagtagaccaatggaacagaattgaagacccagagatgaagccacacacctatggtcacttgatctttgacaagggagctaaaaccatccagtggaaaaaaagacagcattttcaacaaatggtgctggcacaactggtggttatcatgtagaaaatgcgaattgatccattctttttttttccattttttattaggtatttagctcatttacatttccaatgctataccaaaagtcccccatgccgacccaccgccactccccctacccacccactccccctttttggccctggcgttcccctgtactggggcatacaaagtttacgtgtccaatgggcctctctttccagtgatggccgattaggccatcttttgatacatatgcagttagagtcaagagctccggggtactggttagttcataatgttgttccacctatagggttgcagatccctttagctcccttgggttctttctctagctcctccattgggagccctgtgatccatccattagctgactgtgagcatccaccttctgtgtttgctaggacctggcatagtctcacaagagacagctannnnnnnnnnnnnnnnnnnnnnnnnnnnnnnnnnnnnnnnnnnnnnnnnnnnnnnnnnnnnnnnnnnnnnnnnnnnnnnnnnnnnnnnnnnnnnnnnnnnnnnnnnnnnnnnnnnnnnnnnnnnnnnnnnnnnnnnnnnnnnnnnnnnnnnnnnnnnnnnnnnnnnnnnnnnnnnnnnnnnnnnnnnnnnnnnnnnnnnnnnnnnnnnnnnnnnnnnnnnnnnnnnnnnnnnnnnnnnnnnnnnnnnnnnnnnnnnnnnnnnnnnnnnnnnnnnnnnnnnnnnnnnnnnnnnnnnnnnnnnnnnnnnnnnnnnnnnnnnnnnnnnnnnnnnnnnnnnnnnnnnnnnnnnnnnnnnnnnnnnnnnnnnnnnnnnnnnnnnnnnnnnnnnnnnnnnnnnnnnnnnnnnnnnnnnnnnnnnnnnnnnnnnnnnnnnnnnnnnnnnnnnnnnnnnnnnnnnnnnnnnnnnnnnnnnnnnnnnnnnnnnnnnnnnnnnnnnnnnnnnnnnnnnnnnnnnnnnnnnnnnnnnnnnnnnnnnnnnnnnnnnnnnnnnnnnnnnnnnnnnnnnnnnnnnnnnnnnnnnnnnnnnnnnnnnnnnnnnnnnnnnnnnnnnnnnnnnnnnnnnnnnnnnnnnnnnnnnnnnnnnnnnnnnnnnnnnnnnnnnnnnnnnnnnnnnnnnnnnnnnnnnnnnnnnnnnnnnnnnnnnnnnnnnnnnnnnnnnnnnnnnnnnnnnnnnnnnnnnnnnnnnnnnnnnnnnnnnnnnnnnnnnnnnnnnnnnnnnnnnnnnnnnnnnnnnnnnnnnnnnnnnnnnnnnnnnnnnnnnnnnnnnnnnnnnnnnnnnnnnnnnnnnnnnnnnnnnnnnnnnnnnnnnnnnnnnnnnnnnnnnnnnnnnnnnnnnnnnnnnnnnnnnnnnnnnnnnnnnnnnnnnnnnnnnnnnnnnnnnnnnnnnnnnnnnnnnnnnnnnnnnnnnnnnnnnnnnnnnnnnnnnnnnnnnnnnnnnnnnnnnnnnnnnnnnnnnnnnnnnnnnnnnnnnnnnnnnnnnnnnnnnnnnnnnnnnnnnnnnnnnnnnnnnnnnnnnnnnnnnnnnnnnnnnnnnnnnnnnaaatgaaaaaaaaagcaggatacaaattgctcatatgtgttactcaaccatgtaaaacattctttatatcataatcatatcactttaataattagaaagaataagaaaatttagaaaccttcaaagtcttatgtagctatctaactggaagcttgaaatttactgtataatttctgcattgttaataccagttatgatgctgcccattacacttcctaggggaagaaaatgttttgtatttctatttgaccagggagtcttgctcacagttcatcctagttatattgttgggaacataatgaacagggaccatgattgagagacaactatcatctgtggtattttgggaatttttaaaaaaatgataaatcataaaggaggagaaatttaatctggttagaataccagtgtggaactctcccctgcccttatgacctcactgatttcatttccctttgacttttgagtcattaccctactggtatgaagttttcgtttccctgttcatctgtggagctgacacctttgtgtagaacagtaagcaacttgactgtcctgtttggaaaaagaattctgcttatttgatttttttgtagcataaaagttttaatcatatttgtttgtttgttttggtttatttctagtcaaggtttctctgtatagccctggctgtcctggaactcactctgtaaaccaggctggcctcgaactcagaaatccacctgcctctgcctcccaagtgttgggattaatggcgtgtgccacactttggtcttcattcttcttgagtttcatgtggacactttgccccttcttagaattgggaacaaaacacccatggaaggagttacagagacaaagtttggagctgagacaaaaggatggaccatctagagactgccatatccagggatccatcccataatcatcctccaaacgctgatacctttgcatacactagcaagattttgctgaatatagctgatatagctgtctcttgtgagactacgctggggtctagcaaacagttaagtggatgctcacagtcagctattggatgggtcacagggcccccaatggaggagctagagaaagtacccaaggagctaaagggatctgcaaccctataggtggaacaacattatgaactaaccaggcctagttggccatcactggaaagagaggaccattggacttgcaaactttatatgccccagtacaggggaatgccagggccaaaaagtgggagtgggtgggtaggggattgggggagagggtatgggagacttttgggatagcattggaaatgtaaatgaggaaaatacctaattaaaaattaaaaaaaaataaaggcgtgtgccaccaccgcccagctagttttaatcgtattctagtctctctctgtctctgtctctgtctctgtctctgtctctgtctctttctccttctccctgtcccactactgtttgaagagattattcttatttcttgaattttcttggcattctggttcaatataagctgaacatgaaccatgtattccaaaccagatactatttagaaatgtcctatttatgttatagttttttcatatatgtctcagttatgttaatttttaattttattcactatattgtgcggttttggttttgtaaggacataagatatcaataatctgacagaatattctttgtgctctggagcaaaatgcatatcctgttgatatattctatttgtctcttaggtctcatttttataccattgttcaactctattttctttggcatcttctgctaagttgttataataattaagaattatatgttaaagtcttcaaccattagtttagaatgtttctctgcttcgattttgcaactcttttgtatatatatatagttatcattgtcatatattccttatgaaattttccttttatcatgatgatacatgtgtgcatgccatatttttgtgtaatacatcttaatgtattaaaatcttaaatttatactcctattatcattaattcaacattattttcataatgttgactcttttaaaacaagtttacttatatgtacttatcatatataatatcctggttttcttacagatagtatcttctgagtgcatcatgtttattgtcttccatgttctcttacatatatatatattttctgtatttgatttattttgcttaatgtgatgatctctacttgtatccaccttctttttctcagcaaatgatatgatttcattcattcttggctgaacgagagagacgccatggtgcttatgtacctgatcttctttatccatgtgagaggaactgcactaaagagatgtgaagatgtctctgtgtactttactctagagtcctttggtatatgcccagaagtggcagagctggatcgtatggctcttctatttttagtgctttgagaaacttctgcattgatcaatttgcacttgctatgtacagttttatttttcatatctttgcaaatacttgtttgcttcatattagccctcttggctggaatcattttcctttccatttccctgatagggaaggatgttgtatattttttctggttttgatcatttgtttcttttttgataactacctgttcatcaatggatagaagctgattgccttagttaggattttactgctgtgaacagacactgggaccaagacagctcttataagtataacctttaattggggctggcttacaggtccagaggttcagtccattatcatcaatatgggagcgtccaggcaggcatggtgcaggaggagctgagagttctacatcttcatctgaaggccactaggagaggactagcttccaggcaactagaatgaggatattaaaatccacacccacagtgacacacatactctaacaagaccacgcctcttaatattgccactccctgggccatgcatataaaaaccatcacactgataaaataagagcaaatatatattttatagattgtattattccatctgctaatctacctttcccttcaatttgagtattgatgtatgttttattctgctatagctttttttattcaatgtttgtgccatctattgttgaatctactacatttccatatggtataggtctgtatgtagtgagaattttggtttctttaaaaaccacagaagtaggaatgtgcttttgttttaatcccaggtgtggggttgtgggactgcttcagattgtccacagcagctgactataatttttcttgtgttctagcagaagtgtggttttgccagctgcatatagtttttgcttttatgtgatgtttggaattcttgagacttttcagaggatatatgaatgctagggcctcaagaagttggttgttgctatgttgttggttggttgctgttggttgttgttggtcacagtttgttaaatagtcatgtgcaaagaaggaaggagaggaaggaattagatatcctgattgcaaagattaaacttgccccaaggaactcaatgcccctaattaacaggaagtagtctaaggataatgttatcccccttcctttccattatttttctctcctatctagtgttaatagtttgaaagggtagaaaaggggccgagaagaatggaagaaagaagaagccacaaattatctaatgccaactatatccaccagtatgccagtatatctctctgtttattttatattttaatcaattttcaaagtaataagaaaagatgagaagaaatatacaattacattatttttgtaattgaatattactttattgattctctctctctctctctctctctctctgtgtgtgtgtgtgtgtgtgtgtgtgtgtgtgcatgcgtgtgtagtgctatatgatatgacttatgttcggccttaagaattttactgtggtgtccttgtaataagatagctagcaatgtgtttcacaaatttttgccttcaacatttatgttgcttgttgttttagaaagagttttgctgtactcttgattgacagatttttctgcatttggaatatgctgttccactgacacttgacttctattgtatttgatgagaaataatgtgttaatcttagttaatttctttgtgtgtgatgcatttttcattctatcttttcagatgtctccctttatctttgcacatttttggtaaactgtctctgtaagtgttccactgtttattctacttggagattattgatcttctttagccttagattattaattgtatatgtttttattataccctttctgcttaattcaatggtatcttttggtatgttgcatctttcatttttcttcattcttcctctcttcttttgattgcatgattttcactgacctttaggataaccagttctgttttctccctactcagatccatggttaggatcctctagggaattgttttcattattgtactttctgactcatgcatccacttgatctcttttaatgatgacctgtgttgatattctttctctgatgagacatcatcaccaaatcttcttcatttaaccacattttcttcttggtctttgaacatgtttatagcagccactccgaatgcttcatttttctttttgctttaaatccaccatctgtatctcttcagaggcagtttctattgctagctttgttcttacgtatttcccatacttgattctttctttacatggctcacagtgttctgctgatccatttcctgctacagaagccattttcattcttttctttgccagtggtagttacttgtatgagtctaagatatctattttttcctgcagttcaaaggtactcatgtgccaactctgagtacataattattttaccttgatatttagtcatctagcctttcctgtcactgtttggttagaagttttgtaaacttctgatggatgatggtatagcttagttatggtttcatatcttccccacattgtgatctgattgcccctttaaaggcagccaagcacatgtgaacactcatgtttgcatatggggttgactgtgatactatagggctctctgtagggcagtggaccaagccaccagacaaaactggtaatgctgtaccaagttcagaatccccataaatcttataattgagaatgcatggagttcaaactagctcttgaccaggttcctgtcctggagcacgtgaccacgacaccctaagaagaggaccataatcactggtcttatagtataaaaacctacagttctctatactaatgaggtatctagatagttcttgagtgtttagctaatgagcttaccttcctgggcatcccttcctgtaaaaagatttaatcactaatttaccccgagtaagaatatgcatcctcattccccatgaataaaagagtttggacaagcaaggactatctccttcatcaagggcccctttcacttggagcaaagatggattctgccctgttacaggcttaacaaaggcccacaggttctcattctcaactccttgctgtttccagcagagtttgggtgcacagatggatgtgaaacgcagttctcaactcctcatagttcctagaagagtctgggtgaacaggagtttcagaaccatggcctccatcccagcccctgctgtttctcacctgaaaaagcatgagctgggatccctatattagactatgcgtagcctccctgagcacattggcagcatcctgacaacccagcagtaaggcagaaatgcagaatgacaggtctccttgactgtctctttccttggttttctttgttagattgacattgtgacttgtatctcaaagcttccagctttctctttgatatccaacaaaatatacttgctaaatgatatcttcttattcattgaattttttatacacatctatagtatatcttgattatatccaccctgtttctgcttcctttccaaccctcccctgacatatcctaacaaaatttcctcccaatttgatgttcttttatgtatttatttaatccattaagtctctatgtatgtaggtgtggggttatctgctgggatatggacaacctggcagtggctgctcccttaaagaaaagtgattctacgtccctcagccatcatcaactgtcaatagcatcttggctctcagtgaggcctaagtaagcaattttataaggaagtcaatttctaactgacttcatcgtgtgcaaataaccacagctgatatgtgctcatgtgtgcaaaaaccaagttgcattcagaaggcaatatttcatgacttttctctccaatagtcaattattttattctttctctcctctattctgcaatgtttctttagtcttaatgggaagtgactctaactgattctcagtatcttgaacagttaggagtctatgcattaaacactaccaagtataattaaaatgtaaattagtgtacccactttgtaaatttcttaggatgtttttcacatatttgtaactaaatctggtgtatggcccagctatttacccaaagacccaaagactttctttcttgtacaggcatacttgtacatatttactgactgatgttatattcagagtagctaggaaatgaatccaacattgatagatacctatcacaatgagatgggaatttattccctgggtgtgaagaaaaatgatatcatgataattgtagtttaatggatggaactggaaaaaatatgctacaagaggaaatacagacccagaaagacaaatgccacatgttctttctcatatgccagtcctaggttcaaatcttgttttttgtgtttaacctggagtacatgtaggagctgtgaaattagaaatggaccacaatgggagacacactttggaaaaggaatagaataaagtaaagtgaaagtgggggtgaatcctggggatcaggcagagaactttaagaaggcggtggagtgatagggatagagagatcacgaggcaggggaaaggtcaactaaaatgaggtatggatgaagaagttacttgggaacttataatcttgaaagtcaagtaaaaattgtaagaagagaagagtagtacaacacacataatgtgaaggaattgtggggagatggtaagggcttaaggtttaaactgcaacaggggagaggaccaggggagaggcattatcccaaaccaaagatacatgaaaaggccttctgaaatcccagtcattagaacccaacataggtcactaaatcaaaagctcaggacaaagcctgaattacttttccacaagttacaggtcagggaggccctagaggcaccaaaacaatatgggctgctgctgtttgttttcattaccattcataactatagtaaaactgtagcatgggagaaccacattctttgatttcaggacattaagaaatcaaggtttcaataaccaggaaacttttcatgctgtctcatttttcacagttctgctaggggagaaaagatgtgtgtgggtgggtgtgcatgtgtgttattccagtgctggaccctgcatgcttcaagactaacctgccaggccagttaggcactcacttggacaagaaaggaaaacctgtttctgttggtgactcccaaccttcctaatgccctttaatatagttctacatgttgtggtgacccccaatcaaaaaattattttctttgctggatcataactgtaattttgatatggttgtgaattataatataaatatctgatatgcagaatgtctgatatgcgaactctatgaaagggtccttggactcccagatgtgtcctgacccacagattgagaatcactgatttttgagcaagccatgatctaatgctattgtcttcatttagttaaagttgaatacattttaaaacttgagtgtttcaaagcacacaatgacatcacagctttgagaaagtttagacattgttaccagagatcattagaagacttgctgagaggcagttgtgagctttaggactagagaaacacgttaaaaattttgttagaattgcagctaaataaagactatcatctcagaaacttctatatcaaaaagaatatttcttacattaaaggtgctgttctctgatgtacatacataaacctcatagtaaaatgtaaaccacttgcagttcaatttactgtctgagactgaaggttcagagtcatttgttatcatgtatttcatgaataccaagaaacaaaacaacatgaaacattccggggagaaagaataaccacactcagttttattaacaaaactagtatgaaattaagtaataactaggaatgccaagttatttattgccatgaaagctgtgtgcgtttcaaagcccatttagagccaaattaatatcaggccattgttggtgagaatgggacttaaaataaaaaaggccatggctttgtttttattttaaaaccttaagctattatgtttgtaggaaatctcaaagtcagtataaagtagtctaatgaaccctctctcggttgatgtggtatcttaattacaggatgatagtaaaaccagggatctggcattggcatggcaagcatatctcttgttaatactttggcctaaggtttgtatcattttactacatgtgtaaatttgtgtaaccacaagcacagtcaagaggcagacattttttataaccataaatatctcccctgggctctactctggccactatcacacagcctcatcccaggacttgccaactgttaattgtcttcattctgtataatttcccaaaaagtgctgtgcaaatggagccacatagcacatgaccttttagagcaactttatttagacattaaaaaatcttttaatctgatttttaaaacatgtaatgcaaccatcactactcttgttgcaggacatataatatcatgtcatatcagctacagcactattactccttttatcttctgagtaaccactagtttctcctccatttctacagatttccattgtgtttatttcatatgagtgaaatcatttaaaatgtatcagttttattattttcattcacccaaagtagtgtttttaagattagtttgttatgcacacagaattaatccttacactgtatatgactgtatttccttgcatggacatatgacatttaactatttatttttcagccaaagggttgtatccatatttgggctaatgcccataatgtgtcatgtgcaggctcttgtgtagccatgtttatacatttcttagacaagaaactgttggcttgtctaactctatggttaatgttttgggtgtctaagttgttctctaaagtggccacacctttccatgttctctctggtaatgtgtgaaggttctagttcctctatagtctcaacaacccttacattactttttcacctcactcctccttcttacacttaaaaactatgtatttcacaaggaggtaggacgggtcttatggcattgttagtgttttgaagggcctccatattgaattatgtaatgtatgtatcagttcccatttccactgccattagaaggatttcctttttttcacattcttgccaacatttgttatttgttttctttaataatagccattgttattaagcacaagttcttgagactttctgggtagacataactcatatgagatttagtcatcaagtctcctccaatctagagtttctcagtctctccttatcttccatggtgtaaggaaaggaacacagcaaagagatctgagtatgtggaatgctaacattaggataggttggaggaggaggatacaggaattctttttgataaattttttatatctgaatttgttataaattaaataattttagcaagtaaacaaagttacagtcgaatgacattgcacaagagtcctcccatggtgctgctagcacagtgcttatggcatgttctttgacggataacaaaaggctgagaaagtttcaatagtatatgtctgaatgaaatctgaaatacatttctataaatagaagttgtaatgaaaattgtagttgacaaattcataaaggaaaaggtgagcagtttttggattttattagcttataatgccaaatgataagctatttttttgcttaaaaaatcaataaaatttttctagtagttggagaatcctatttagatagaatcaatgtgaaactctgatacagagtaacaataattgagaaagataattagataatttagaaagatatacgacgaacttcaactccataaagaatgacatttcagggacttgtttgttctaaatagtgagtaaacaccagagttaccaatgagcataggcagttacaatttatgatgctttggattatagcttattcctagagaagattgagttggagaacttttccacatatataatctatatacatatataataaaacaaataatcctcaaaaatagaacaaagaagaaaagaatttagccatttttctatttatgtgaaaatatccttgaggctgtatttacttgtcccccttttctttctcagacagtgtcactttgtagtgggttttcttcaaacccacgatcttctttcatcatgttgagtgactgacaaatgcattgacctccagtgctggagtgctggggtttagtgaattcatacatcacttttagcagcacacacatttccacaatgctcattctgacaactactgtcttcttaaagttttccttaagcaaactttatatgcctcagtacaggggaacaccagggccaagacgtgggagtgggtgggtagaagagtgggggggaagggcatgggggacttttgggatagcattggaaatgtaaatgaagaaaatacctaataaaaaattgattgtagatttcttctacctcctttattaggttaatttatagacttttcagagattctagagactgggattcatagtgatatgtgaaagactcaactggattcaatagaaccttgttttccagacacaagttgacctcagctctcagcactgagtttggtgaaaagatgggaattccaagtgtcattgtggggcttgcttcaccccaaatgccaagttggagcaggagctttttcccctttataaatgtttacatttggtagcaggtgaatttaatttaatttatgcactattatatggattaagcaaggacctgggttaataatttaaacatttattatttcctccaacagttggatttcagtatatagaataatggaatcagaagttttcattaaaacacagtcttaaaaaagcaaggaggctttaatttgtcttttgctttaacacctatttttactttagctttttataccaattactatttatcctcaggtatagagaaggataaagaaaagttgctggaatattcatgaccaattttggagacagtgaatacaaaactgattagtgtttaggattcacaggtagggatgatgaaattggaatcaagttggaaagagactgcatttatgtcccagaagtagaggccaccagtcctggagtatgagagttttgaagaaaggaagcatggtagtgacagtgaccttgccgttcttgtcctgccgttcttgtccatgatggacactctaaaaggagcaaagtaagagacaggccgattctagctatgtaagttcactaagcttcatagactttgtgtctgggtaattttggtgtgtgactttgtttatttgtttgcaagcttttctttaacaaaatgtattcttaaaagagagtcttgtaataatgtaggatgagctgagggaggaagagagggaggaaggcaggggaagaaaggagagggaggaggtttggatgaaaacaataagtggtgtgcatagaaaagtccaggcaaagaggggcaaggatttggtgacttcttgaataagagagtgaagaatgaatattattcaagaatattgagttttcaagcctgactgttagaaaataaacaatagttacaaagctaatgaatcaaagcgaactatttccttatttttctaccttttgtgcccagacacatttttgcttcttgaattcttctatagtttttgcccaccaatactaaaggcacatactaattagatgagggagcagaggtggagaagacatggttgaaatcagatctgggcagacttgcaggccatctggccgattcctttctaccttccttgtcaccatggctattcagtacatctggctatctggacttcgaccaactcccacgtgggactcaaatgaaggatagcaaaatgaaatagatcttgttcttttgacctttaaagtgaaaatttagaacttttgaatctgatttacaaaaggcagttgctttgaatgtgtgcagcaatctcttctcaaggcctcccagggtttctgcatgtactgcctctaggacactcactgttctcactaatttttttctggaaataattttctccatgccctgcctgataaaaagtcacttggacatggcagttgagggcttgatttatgaggaatgctcaaatacaaacaccatgccatgagaaatgctctggtcctagtgaatgctctgttatctgataggagccatcctaccagattttcagatgatgggctagtcccctaggcatcttacagatttgcagcagtgtctcagcatttggtgtacacaaatattgcatttgtagacagtacagccttcacccagagagatgcgcaatgtgactgatcttgggcagactgtgtatttgtgtgttcttaggtgtcactggtgatgctagtttgagggtctaggaaggcaagaaaggattatgtttataatggagtctgctgctctgtagctaggaattctgctccctctggccatacattctgaaccccagtcagctgtgctctttgttttctgaagcagcagaaaccagtcagcaggtgacaagccgcattactgtactttctttgaattttcccagggagtgctaagtttaccatggttagtgctggcacttttctgttatttcaaggatttgctggtttttccaaggtggtttttccttggtgccagggctgtgaataggaacattatgatgatgtttggtatgtcttgttatttgaatattgtccaatttacacttttaatatgaacattttatctctgctcttctttctcatgtcttcctttccaattcttgattaattacagacacgaatggcatcacttataaacatacttgtaaatacagcagtgtggctttgggcacctcagaaatgaaagttcaaaccacttggaactctaactgacattcctttaagtctctatgatctaaatattcttttctgtgatgccaaaaaggttctgtgtgatcatctaaagtttgaaattctttctcaaatcaaagacactgccaaactcagaagcaactgtgtgaagaaaatgtgtggaaacaccactcattacaggttggtttataaaaagagctgcagattgataggtctttgaaaaatgtttggtgacacaaaactctttcaatcagttccaaatctggcaactctcttgttgcattagatttccgtcccctcacttttccttctaacagagacagacacatcccttttttgtgtcctgtttcagatgactgatggaaaagtaaacagcaaatatgagcatgtgggcatggtttgtttctttttgcattgactagaaggcagtgttgaaaaggagacgttgctgtcatttcacaatgtaggaaatttagaaaaggtgttagagctgttttaaataacttctatttttaggttatgccattcatgagggtatgtagcctttcctttatagaaggaatttgtttaaagtatatctgagatcttctggtgacaaataaacagtgtgttcaaaagaaagccttgtaattttttcattagatgattcatgcttaaaaatgtcaaatgatcagaagcgaaagggccagtgatcgggtcattagaaacatatggttctgcggatcatggagctgccaactctaaatatggaatctcggccccttcctttgtccttaaaagatgtcagagacttgtatgcctcatcttttttaaatcctaaactcagtgcttcttttctatgtggcatagtccaatatagtagataagggaagggtgatgggagcgcccatcttttgggttaaaattctaattctattacttattgactgacttgagaaagctgcttagcctttctgtgctcccatctcctaatttgtgaagtgaagatgagattttaccttgaaagaccagtgaagaagacaatgcgtacaagactctagacatatactgtttgtttgtttgtttgtttttcttactaaacttcctagtttgatttattgtttcccctcagggcaagaagattaagacagactcatattgctatttaaaatattgctgaggaattttaattctttaaatggcttaaatattacaagcatagattgttattttataataattgaatatttggtattttggtagatatttaaagaaatgactgcatattctccaaaatattttgctttaatgcttttcaacattatatatatatatatatatatatatatatatcccagtatatattcattattttttaaattgaaaatatttttatatagtaattatggtcatggtttccccacccttttctccaccctcttcttccccaccctcttccccaccagatccttccacctccctaccagatccttgattgtctttttaaaagatttgttttgcctgaatgcagtccacatataagacagaagagggcaccagaagcctgggaactggaattataattcgttatgtggcaccatgtggatgctaggacctgaaccccaattctctacaagcagagcaagtgatgttaaccacaaacccatatctccatacccacatttagaatccttcagttagtgagaaaaacaatatgatctacattttgttctatttttctgaagcaatgaaaaggtcacagcagaattatgtattaatcacacagaaacatcccaaaaggactcacatgaaagttaactgtaagaaaattaattcttccaaactgggtttggtgtatgtttgcaataatatcttatacacattaaaatgatgtgtgtaaattttttgtaatcttgatttcctctttattcttcaattcattaagactgatgactgcaagccagtttgacacacacacacacacacacacacacacacacacacacacacacgatagtcttgaagtatctactgtatgggaggaaaattctctttaagatagagaagaacaaagttagtgtatgctgtgattttcttatcatacagaattttgtgtgagagggcaagaagcataagcagactggagcaccctgtccactgccccattccgagaggacctgaagcaagacctaagtcctggaggatgcataacacaacgttctatagccattgtcctggatactagcctgataccaatccagagaaatcagtgagatgtgagaggggaatttccaatggactcaacagtttcaagacatctaagcagaagccacagggatcgccaagggtggaggagccatctgctcattgccaattacctaacagcaccctgatctgaagaacaggataatactcttttatacattgggaggtgaagggatttgtttgcttattataccactagtgaaaagtcttctaagggacatgccatgagctaaaaggtgaatgaatggcagaatgcagagtttgccctctctgctgaaagtgtaagtgaacataatcattctgtgcccccaatacaggttaggctgttttctgagggtagaaaatggcagaggaagctgcatgatcaactccaggggtggattggaccagagtccattgtgggccagcccagcccagtgcctgaagaattattttcaccttcttattctcctgaatccagtttcagtgctttcagtttgcacccctttgttactcacataatcatttgtctgtagcctttcctgccaagtacttcccaaactatgactctcagtgatacatttgtttatggaaggcctgtgattcacccttaaggacttttgtttcttgttttactgctattttttcttccctttgaatgctttcagttgcaacttataacaagttgggggttgtttgttctatgatttttagctacagcaaatgcctacttaggactgattttccttcatgcctttacagttattttaaacacaacattccctctggccatgacagtacagttataaagaatcaagatatccaaaagtaggatatgcatttaacctttcaaataccactactaagtggttaaacccagtgaccatgaaggaagttgagagaagtatgctttctgtctagactgtggcatactgaagtcaacttgcctgctttattggatttgtaatctgaaagtccttgatgctaacttaatacaaacaaaataaaatattgttatgagtgtgtgcttaccatatgttggatttatccaatgttgttttgcattttcttttataaaatgtgtctcaggatcactagcagttattgttcataggtttaaaacacaaatcaattgaaatcatggtaagtattatatccactaccactaaggacttgtatttcagattcaactagtctgtttgaatccctacctcatagagtgtgattatctatgccatgcatttaattagtcactcaggttttcccctcttaggttagacatgtgcaaaggacacatgaggtgggagcaagatggaagcctagagtgtagaactgtggggagagttgtgctcacaagcaaatattctgatgcagatttatataggtggattcaacttggagatggtcaggagaagaactgactgagtagtgaggttttaatgctgccttccaaatagacagagagagggataattcaaagcaaagggaagaatgaaagtggcaacatgagagaatctccaggagtctggtgtgagtgaaacagatgtgagttggaaaagcaaacattatatgaaagtggaaagatgggttgagttaccttacaagagctgtgggaaggtaaggtgatgcatgtttacaaataaacaccttgctgaaagagcttgccatagcaacccagaagaagtggagcgctcatcttgacataaaattcaatgtctgcctcattcccacaaacagaagacttagtgagttttgagggctttttaatttgtattgatataagggtgagaaattatatttatttaatggtaagggctttgggggattaagctactaaaattttattaggagaattaatgatcattcttgtccttaaagtagatgaaaagcctttgcccaccacacagtaacatgtttgcaggtggagctgaagataacacatttctgtcatatatgtagaaaattgtagttcaacctttctgacctgtctagatatctaggagatgagataaaataaccaaaggagcaggcctaaggagtggggtagaccagaggaagccatttcaaatacgctgtcaaaagcgtgtcacatttcaccttctacaacatctatctaacatgaacgaatactttcacatcttacagtgacatacgactacagagtaaggaaatttagtttagaaaatttcagagcacacaagtgttatcccattgattatgtttccctgtgggacaccaagagaagaccatcactcaaggaagattgttagtctggagtccattctctttagagggggttgaatgttaacatttacttagctgaaatttaagtaagacattttttcttttttttttaaattttttattaggtattttactcatttacatttccaatgctatcccaaaagtcccccataccctccccctcacttccctacccacccattctcatttttttggccctggtgttcccctgtactggggcatataaagtttgtgtgtccgatgggcctctctttccagtgatggccgactaggccatcttttgatacatatgcagctagagacaagagctctggggtactggttacttcatattgttgttccacctatagggttgcagttccctttagctccttgggtactttctctagttcctccattgggggccctgtgatccatccaagagctgactgtgagcatccacttctgtgtttgctaggccccggcatagtctcacaagagacagctctatctgggtccttatagcaagatcttgctagtgtatgcaatgttgtcagcatttggaagctgattatgggatggatccatggatatggcaatcactatatgttccatcctttcatcacagctccaaattttgtctctgtaactccttccatgggtgttttgtcccaattctaagaaggggcaaagtgtccacactttggtcttcattcttcttgagtttcatgcgtttagcaaattgtatcttatatcttgggtatcctaagtttctgggctaatatccacttatgagtgagtacatattgtgtgagttcctttgtgattgggttacctcactcaggatgatgccctccaggtccatccatttgcctaggaatttcataaattcgttctttttaatagctgagtagtactccattgtgtaaatgtaccacattttctgtatccattcctctgtggaggggcatctgggttctttccagcttctggctattataaataaggctgctatgaacacagtggagcatgtgtccttcttacccgttgggacatcatctggatatatgcccaggagaggtattgcgggatcctccggtagtattttatgtccaatttgctaaggaactgccagactgatttccagagtggttgtacaagcttgcaatcccaccaacaatggaggaatgttcctctttctccacatcctcgccagcatctgctgtcacctgaatttttgatcttagccattctgactggtgtgaggtggaatcttagggttgttttggtttgcatttccctgatgattaaggatgttgaacattttttcaggtgcttctctgccattcagtattcctcaggtgagaattctctgttcagctctgagccccatttttaatggggttatttgatttttctggagtccaccttcttgagttctttatatatatattgtatattagtcccctatcagatttgggaaaggtaaagatcctttcccaatctgctggtggcctttttgtcttattgacagtgtcttttgccttgtagaagctttgcaactttatgaggtcccatttatcaattctcaatcttacagcacaagccattactgttctattcaggaatttttccctatacccgtatcttcaaggcttttctctactttctcctctatacgtttcagtgtctctggttttatgtggatttcctaaatccacttagatttgaccttggtacaaggagatagaaatggatcaattcgcattcttctacatgataaacgccaattgtgccagcaccatttgttgaaaatgccgtcttttttccactggatggttttagctcccttgtcaaagatcaagtgaccataggtgtgtgggttcatttctgggtcttcaattctgttccattggtctacgtgtctgtcactataacggtaccatgcagttttttatcacaattgctctgtagtacagctttacgtcagcaatggtgattccaccagaggttcttttatccttgagaagagtttttgctatcctaggttttttgttattccagatgaatctgctgattgccctttctaattggttgaagaattgagttggaattttgatggggattgcattgaatctgtagattgcttttggcaagatagccatttttactatattgatcctgctaatccatgagcatgggagatctttccatcttctgagatcttctttaatttctttcttcagagacttgaagttcttatcatacagatctttcacttccttagtttgagtcatgccaaaatattttatattatttgtgactattgagaagggtgttgtttccctaatttctttctcagcctgtttatcctttgtgtacagaaaggccattggcttgtttgagttaattttatatccagctacttcattgaagcttaggagttctctggtggaatttttagggtcacttatatatactatcatatcatctgcaaaaagtgatattttgacttcttcctttccaatttgtatccccttgatctccttttgttgtctaattgctctggctaggacttcaagtacaatgttgaataggtagggagagagtagacagccttgtctagtccataattttagtgggatttcttctagcttctcaccatttactttgatgttggctactggtttgctgtagattgcttttattatgtttaggtatgggccttgagttcctgatctttccaagacttttatcatgaatgggtgttggattttgtcaaatgctttctcgcatctaatgagatgatcatgtggtttttgtctttgagtttgtttatataatggattacgttgatggatttctgtatattgaaccatccctgcatccctgggatgaaacacgtaaactttatatgccccagtacaggggaacgccagggccaaaaaaaatgggaatgggtgagtagggaagtgggcgggagggtatgggggacttttgcaatagcattggaaatgcaattgaggaaaatacgtaataaagaaaagtatatttaaaaaatatttagtgaagatggatgattgttttgatatgttcttggattcggttagcgagaactttattgaggatttttgcatcaatattcataagggaaattgatctgaagtactctatctttgttgggtctttttgtggtttaggtatcagagtaattgtggcttcatagaatgagttgggtagagtaccttctgtttctattttgtggaatagtttgtgaagaagtgggattagatcttctttgaaggtctgatagaactctgtactaaacccatctggtcctcggcttttctttggttgggagactattaatgactgtttctatttctttgggggatataggactgtttagatcattaacctgatcctgattttactttggtacctggtatctgtctagaaacttttccatttcatccaggttctccagttttgttgagtatagccttttgtagaaggatctgatggtgttttggatttcttcaggatctgttgttatatctcccttttcatttttgattttgttaattaggatgctttctctgtgccctctagtgagtctggctaagggtttatctatcttgttgattttctcgaagaaccagctcctcatttggttgattctttgaatagttcttcttgtttccacttggttgatttcacccctgagtttgattatttcctgctgtctactcctcttgggtgaatttgcttccttttgttctagagcttttaggtgtgttgtcaagctgctaatgtgtgctctctctagtttctttttgtaggcacacagagctatgagatttcctcttagaaatgcttttattgtattccataagtttgggtatgttgtggctccattttcattaaactccaaaaagtccttaatttctttctttattccttccttgaccaaggcatcattgagaagagtgttgttcggtttccatgtgaatgttggatttctattatttattttgttattgaagatcagccttagtccatggtgatctgataggatacatgggaaattttcaatatttttgtatatgttgaggcttgttttgtgaccaattatgtggtcaattttggagaaggtaccatgaggtgctgagaagaaggtatatccctttgttttaggataaaatgttctgtagatatctgtcagatccatttgtttcatcacttctgttagttttactgtgtccctgtttagtttctgtttccatgatctgtccattggtgaaagtggtgtgttgaagtctccctctattattgtgtgaggtgcattgtgtgctttgagctttactaaagtttctttaatgaatgtggctgcccttgtgtttggagcatagatattcagaattgatagttcctcttggaggattttacctttgatgagtatgaagtgcccctccttgtcttttcaatgactttgggttggaagtcaattttattagatattagaatggctactccagcttgtttcttcataccatttgcctggaaaattgttttccagcctttctttctgaggtagtgtctatctttttctctgagatgagtttcctgtaagcagcaaaatgttgggtcttgtttgtgtagccagtttgttagtatatgtctttttattggggagttgagtccattgatattaaggaaaagtaattgttgcttcctgttatttttgttgttaaagttggcattctgttcttgtggctgttcttcttttatgtttgttgagggattaccctcttgctttttctagggtgtggtttctgtccttgtattgctttttttctgttattatcctttgaagggctggattcgtggaaagataatgtgtgaatttggttttgtcgtggaatactttggtttctccatctgtggtaattgagagtttggctgggtattgtagcctgggctggaatttgtgttctcttagtgtctgtataacagctgtccaggatcttctggctttcatagtctctggtgaaaaatctgttgtaattctgataaaaatatggaatgcttcatgaatttgtgtgtcatccttgggcaggcaccatgctaatcttctctgtactgttccaattttagtatatgtgctgctgaagcgagcacgacattttttcttagtggaaagaactgtagaactgtttatattattgaaggagcccaataaattaataaagataagaacatatttgaagtatgcaaatctgaactgcgccccactgctctgtttgtatatatcttattttctgatagattcgattctccacaattgatcctaaagaagcaatgagaatcatcagaaggcatttcaggttaatattttacaaaagaagtttcattattattcacaaagccttttaaaaatgtaacatttatttcatcatatcactaaaacaattgtccacattgtgttttacagtacaatattagaaactacaaatcaatgtttcatagttaattttaaatattatatactaattatattcaaattaactcaacaccattttattattatcttacctcatttagtaaaacaactctataaagctgatacaaccataaatcattttattaaaatttgtcatttaaaaatatataagggaactatttatatcatgaataaaatactatttcctgatatatttattgcctctaaagtataactctgatgtttttcattattgatttcaaaatttaagtttgtttagtaacctaattgattgattaaagtattttttaacattttatgttttttttaattaggtattttcctcgtttacattttcaatgctatcccaaaggtcccccatacccacccccccaatcccctacccacccactccccctttttggccctggcgttcccctgtactggggcatataaagtttgcaagtccaatgtgcctctctttgcagtgatggccgactaggccatcttttgatacatatgcagctaaagacaagagctcccgggtactggttagttcatattgttgttccacctatagggttgcagttccctttagctccttgggtactttctctagctcctccattgggggccgtgtgacccatccaatagctgactgtgatcatccacttctgtgtttgctaagccccggcatagtctcacaagagagagctgttttaagaaactgtaggaacatttccatatagtagaaactcaatacccttaaagagatttctttttagtccaaacagaatagcaggaggctaactttatacagtttaactatattacccagaaaggaatttttatttgaggcaagtagataaaataatgtgtatgtgttcatttaattaatcattttgaaatgtttttgttatgcctagcatatgcaattgaattcatatactctattttttgttgaaatgccaagcatggttatctataaaacattatttctttatccttcctccttttgtgtctgtataacctcactggaatccatcagtagatggccaatttaatatcattactggtgaaagccagataatgtagcatagctagggagaggcactccataaatctgtgatttgagagactactaagattggtagaaatgataccttattatttttacatcacttggcatggataattttgacataataattactacaatcaaggcagtgaatacatccacttagtattaacatttttcaatacttggatttttaaaaaatgtttgagagactcttcaagaacacaaacatcaggattgttactaattaataataatccttagataggtgttatgaaacaatataaagaattttaaattgtacgtatttagtcgatatgatctaaatacattgtattcacttatgagattactgaagaataaaatttaaaaaagaaaacaaagacttatgattagacttttttgtagtcaaaatattcaatatcttctcttgttcttccttttttaaagccagatatggtagtagttgtgtcattgaaagttttgttagggcagagtgttctgtcctgtaagctcttgctgagtctgaatctatgtaatacaaaatcagcattattgctacgtaagcattgcatgcagaccagatatatttgtataatcttatatattgtcaaggatactaaacaatagaataagaaagctctaagtctggggcctttttgtcaaatatttctaaggaaaagaaaaggaaaggaaaggaaaggaaaggaaaggaaaggaaaggaaaggaaaggaaaggaaaggaaaggaaaggaaaggaaaggaaaggcttgctatgcagaatgacagtaagaagcaagtattgccacctcagccaagatgttttctgaatcaagactgaacaggaaatatgtacagattctgagcttctcatccattttttaatctccttactcaagaagataaatgaataataagaaagtcctgggcgatgagaacataggtaggaatacaaagccacatgtggggatgagatgggaatatggaattcacgctgtgtaccaagcacatcagaagtaaccccagcttttgctgtgagatgactagcagctagcccaagaaaggagacatcaccattatgagggaattgacataagagttgttcaagtagtaagatacgtcatgggagctgaaggggtacacttttttttagtctatttctaggtaaggagggtggtggtgcctcctattctattggcatggtgtgagaaagcaccatttggctatagtacaccaaataaagttatttcttaacaacaagacaaaaaaaggtaagacttttactaacattagtcgcaagaaaatgcttttggtattttaaatcatggtagagttgttgttttcaacactaactaaatgttgttagtaaccaagacacaattgaaatgtgaaaatgaatagtttatgcaattttgcgaagtcattcacgtgtatagcagtaaattctgacagtgtttctggagtagaaaaaaatctttatttacttatctgtttatattggtctgcctcttcaggagacatgctcaaactcacatggcaagggaatggtaataagtacagtgcaaagctataactagatatttgaatgagtattttttccactaaggcaaaaacaattaaattttggcagaaaaatattctaataatttaccatacatagctaatataaatataagcatagattttgtttctttttgaataatatattctgatatcttgctgcaatcttgatcatgtggaatagaatagagaataagaggcatgatagaataactggcagctactgaatagtattgtttttattgcacatagatgtaatgtctgtaagaatcagccttcatgttcactaataaacaatcagatcaatgaaatagtaacacagcggtcatttagtcactgtgtgatttggcagctttgaggacagaaaggggagcaagtactcagcatgatacaattgattgtgagaccattgcctaattatacacaatgtaatttccgctttagctcctgggtaaatgtttgttcattccattgggcacattaatattgtcaaacaaagtggatatttaaccattttttttaatctctatataatagcagttctttgagagttaccaaggttaagtaactagtttgatttctagaaggtcctaaaagtgagtagcaaagcaaatgcccttctatgtgtgcctgagggagactggtgacatatatcaaggggagattctctacatcaaaatttagtacattggtgcctcaaaaactcttttttttttttttttggtatttagcttcttaatttttaaaaaaaaaatttggtggattttttcttttttttttccttggatattttatgtatttacatttccaatgttatcccctttcccatttccccctgtggaacctccctgtcccatcctcactccccctgcttctttgagggtgctcgccttcccacccaccaactcccacctcactgccctggcatcccctacactggggcattagtttttgtcaagagtaccaagtttcatatgatgtgttttgatcttatgtcccctcacccccaagcaccaactcttcccagtatgtcatcctctagggcttatgacctgggtagccataggttcttgatccaataaaggtataaagtgggtggttgttcccataacactcatgctacatgtagacaagtctttctagactactcatagatatagctcacagaacttaccgctgggtattattggtggttgctcttctctatcagtagcttgcatagctcctgccagtaatattgaagttagctattaaaggatgaagcttccagcgcagtacctgcttgattttatgatgttgttactcaagtatgtagtgtaatcttcaatagtgttttactgtcaagttaccatgggtaatctagagcaaaggcaagaatctgtaatatttgggagtctggaatctcattgtcaggcaacttcaaaacaaatcattcattcctggtatcaggattttatctgttagcttctagtgcattggttttcaaccttcctaatgcttttaaacagttccttgtattgtgattatcccaatcataaaattaatttcactgctgctgcatagctataattttgctattgttacaaatcattatataaatagctgatatccaggatatatgggatgtgactcctatgaaagggccatttgacacccaaaggggtcatgatgaatatgttgagaactactgctttagtgtctattaggagtggtgttgccattttatagtgtaataccatttaaactcttttttgtaaacgtgtgtgtgtgttagagagagagacagagagagagagagagagagagagatgagagatattgagagagataacttctacagtattagtattagtccatgtgtgctacaaaaggtctttagtattattaatctctccctgcatgtcctctgtaccctaatgcctactatacttcatgtagttttcacttcatgtaaactattgcacttcccttgtatcacattatactaatgcagtctatctctttgtgtcaccttagaaattttctgaatgctattggtattccaaagtaaacacaatgtctgaagattcaaagctaacattcacagttgagatgaaaaaaaccatgtgatatttgtctttttggatctgggttacctcagaatgtttgctttagttccatccatttacctgcaagtttcataattttattattgttaatttttgaataatattacattgtaaaaagataccatattttcattatcagttttcattatcattcattatcaggccatttcaatttcctggatattctgattagagcactgatgaacatgactgggcaggtatctctagtgtaggatgtagagtcctttgtgtatatgtccatgagtggtataggtagaagatatggaagatctatggtttgtttatttgtttgtttatttactttttgtgggactgtcacacttatttccactgtgttttcaccagcttgcatttctacgagtggtggttaggtgttcccctctacctacatccatcctagcatttttcaacatttatgttttgagtataattgtgactgtggaaatgtggcatctcagagtagttttaacttgcacttctctgtgtgtttcttggccatctgtttttcatcttttgggaactctgtttagttttatgttccaatgtttagtttggttgttcttatagtgtttaattttttgaattctttatgtagtctagatgctatccctttatcaggtgtacagccagtacaaaacttgttcttttctgtaagctgctccttcactcaaatgatgatgtattttgctgtacagaaaacattaatttcatcatgtcccgtgtgttaattgttggataaccagtgcaagtgccattggaatcctgttcagaaagtcttccctttgccaatatagttactacttttttctctgttagattcagggtctttcatccattggcagttgaattttgtgcagggtcaaagatgaagattgagtttcattcttctgtgtgtagctactggtagcatttttgttgttgttgttgttttttgtttgtttttttgtttttgttttttgtttttgttttttttgttgttttttgtttttgttgttaatgagtgacatcttagttacttttctatgcttgtaatacagcaccagacgaaggcaatgtagggaaggaagtgtttattttgggtttacagtttcagaggcattagagtccattactagggcaggaagtgtggcagtcaggacccaggcatggtggcaggaaaagctgggagctcatcttcaaaggtaaagaggaagcaaatagagatcagtagacatccacatgccctttgaaaccccagggcctgcttccagtgatgctcctccttcaacatgagcatgccttctaaacctacccaaacagtgtcaccaacttgggaacaagcattcagatgcctgagatgtttggttcaaatgacaacaagcaattactgacattttgagttcagctggcaagaagaagtcacattagcaaggaaagagtgaattcagcttatttcagaactcaaagtatccatttttcttctgttactggccatttgtcatcctttcaacttccatttgttttggggtccacattttgtgtctttttgtaaaagttttatagtagttgctacagtgagcacaaaactgagcaaaaaatatagcccctatgttaaaggaatttatactcttggtgagagtaaagagaagcgatgtgtttaattaaaaaaattcttgaagctatataaactaaatgactaagaaatagagccatgaaacctaaatatactggcaagcaggcacgaatgaaaacaagaatgagaagtcactaaagggacaccaagaaaagtgtcaattgttcaatagctaggtgtagccaagtagcagcagagctgtgatgacccgtgggccgcctgatctgttgctgctgttctatgggaagctttagtgctatggaagcgatggaatcagtaaatggatttgtttccatcaactacgactctgctctttggaataattcccaataatattttccggaaggtacttaaggatcatgtttaaaactattcatttcttgttgctagaaacttactattctaagagcaggaagaggtaggcactgtgcagagagaaatactaggcaataattagaagtatcttcaacaactttgcaaactgttaagataggaaggaaaaaaaaaaaaaccaagaagtgtaaagagctctgccatgggctcctgttcataaaatggaggtgtggaagtaattcctgttttgtaagagtctgttagaagcagatgtatattaaatagagaggcatgtgcacgagtgcgcgcgcacacacacacacacacacacacacacacacacacacacacacagtctgagagccagtgattataatatgctatcaagcggagagagtgcttgatttagccttttctaccaaaaagagcaaagcacctgacatcaatggagttaaggagtcataatgtgaagagttcagcaaacccttggcagacactcgcagtgggcaaaggctggttcattttaaatggacaaaaagttcctcgttggttggagctgagatggaaggaggcaaatcgtaatggccaaaagttccacagccctggctttcaggcattgcatgttcacttaggagctgtctagtccttatagggtgggtgtggaaaatgtaaacataaccacactcttagccatcctctgcagttctgttttctctgctttctcgcttggggtttgcaggcactgctgcacaccaagcagagaaggatggagtagagcccagttccagttggcttcttcccttgggctgcccagacctcaatgtatactggcaagaaaggatgaaacaaattctatagtgggtgggttaacaggatcctcgcctggctgccaaggggaagagggttcttatgaagatttcagtgttacagctcttttagaaaacagctctcttagaccatagtcaaccaaacatcttatgcatatacacattatttgtactaaatcaagggctatatatatgaaacttggacggtgaaaatgtgtggttcttagggtgaaatttcattggctgaggcttgacatcctgtggatgtttcatttgcatggaaaggtattccaagaagttgaacctataattttgccaaggattacatgacattcctcaggtagaagactgggatcgggctccccagaccaggtgaagacaaggaaaccccactaagaaaagggagttcttcattttgcacagagctcaggatggctgttcacatatgatagactacaatgttagcagtgaaatgcagcaatcgtacactttattcatgaggaaaacaaagtaacccctcagccacagattatgcaggtgctagattcatgactgataggcaggtatatctgactcagccatgtctgactttcttcttccatagacactggtgctttccacaagcaagggatgttctccactcctgtcagtgttgtgtatgacaaactagtggtcaagttaaatcaaaactcaaccctaccctagttatggctttatactgattagcttgataagcaaaagtgtttgaggaggcagctacaggtattataaagccattgctatattgtaaaggcttttctggtcatgaatatttcgttgaaatgatgcaaattctttgtcagtatcaagacaaataagaaaaaacataaacaatattttatattgttacagccatatattctgaaattctttcaagtaacaagtgagtaagaacaaagaaattaaaactggtctttaaattgcaaacaggggctagcatgttctaagaaccccattcatcatgctaacaacacaagcaaatggcaaactaaaaggcagttgagcatgaggggtaatggctactctatccacagggtaggattctcaatctaaacacagtggagctgaatgtaggacttatcccagtcaaagtcacaatagaatgtagttcacgggaaatgaataactaggtgaatatttagaccaatcactatggctagtttatggtttagagagggactttgtaacatgagaaaagagttaaacataaaagccaccagtggaaaacaaagccaagatgtttagaaggggcttttagtgacagacacagatggactacagttccaacatgtctgtttttatttatgccttccttcttcttgcatctctgtccatttctcaaattcttcacttgctatttacacatcaaaacatctgggattgggcttccagcacctgctataggaagtgaagaccatactgctgaaaataagtttttaaatgaataaagtctaaatgaacacttcttatttagttcaaaattaatgtattttaaaatcagactctaaacaattatacagtttgagaaataacaacaacaaaaccattttccaaacccgaaggtcttgataatttttctttttaaatgaaggctacaattcagaaactggaagtagactcctcatagcttagaactggaagactaggcagtacatctgtttaacatcttgcagtttgaagagctctgccttgaaaatccttctgcactagtgacacacagaataaaaggttatgttatgactttcagatggaaacctgcaaaggtttatctgctggcttgcatcattagctcttgtaacttttgattttgttaggaagtttccttgtatgaaaaaatataataaacatttaaagttttgttcaaaaataccgcaaagcatttttacttgggagaaaatggacgagctgtggaatgaatggaatgttttagtcacaatgcttgacaggaagtataatcatcttaatgtgtttttatagactatatttaagtgtgctttatgcctatatgcactgggttgggatcaaaagaacaggaagtctgttgtgagaatgtgtcttttagcaatgacggggaagctacatccatgatacttcaccaatgtacctgcctgccaggacttaaataacgacaataataacagctatctattgtgaactgggggaatctcatggggacctactcctaggcaaagaattataggcaactaaggattgttgagagaagaaggattcatcttctgcagggataagtccctaagtggttatccaataccaataatcagttctgaagtcatatacacacaagcaacatcaagtggactgattgggttctatacttgtttactcatgcacatatacaatgataacaaggaaaagggggtcatgagtttgaaggggtgcaaagagagtgtacttggaaggagctgatgggaggaaatggatggcagaaatgcactatattttaatttttaaaactacatttgtaactacaggaaaaccgcttttatgtggatgttgtgaaggtcaaagtttgcagtaatacagatgatgtttcatgaaggcttgtatgttacctgactgtgggaagggttaaaaaagaaggcagtttctctacactattgcttttcttctgtttggctatgatgtgaatgtggggttttgttgttgttgttgtttttatttttgtatctgtagaaagggaaatgtttcttttattttcaaccacctagaggacttggccctagcatcttgtctttgtgcccctagcatattttgaacacatcacaaaaatgcatttgtaaactccttagagagcaagtgggtgtgtgaaagatagcactcttttagatactagcataccctccgatccagataagggattttccacatgcattttattgtgtggaaagcgatggtggtgataagttcttcattaaagagctgtctgtctttcctgaaatgtacactctctcccctttgtagggacagtgatataatattgtttgcttatgtaaccagaatcatttaattaaagggtatcagttttctttgggatgccatgaataaataaaacttgattctcctcatttgggtgccatcatagactttgcttctatagtgatgacctgtgcttttggcctcagtagggtgcacatactgacactgttagtagacagaagttttcactggggaaataagtttagtatactgttattaatttggtttagaaaatagctgcagtgttcagacaaataagatatagcaggacacatggtcttcgttattcaataactatccttctgcaaaggaaacatggtctatttcccatttgagaaggggcttacaaaaactagtaaatacagaaagagggctacatatgtactataattttattgaatagttctcctcatgtgctcatatagccctcccccagtccctgacacactcgcacaacatgtccacatagatgtattcccagctggtattagcataatcattaccacattataaacaagcctgtggaaaaatagcctgagagatttagatggtttgcttcataaatgaaggaaggtgggggtggagaaccagatattttgggaacaaattcttctttttcctccctctttagaaataatagcttagatctcagaatctcacttgattgcatggagagaggaggtggagttgaagcgtcctgacatattcagttttattggatgaaggccagtgaaaggatttccatggagccccgctgctggaagaaaccctcatttgatgtggaagcaagcctttctttcttcccattggagcccaagtaaaaagaatgcttttctaccagcttaatgtaattcctgttggtcaaggtctctggctcttcctcccttttcaattgtgatttttcctggagttgactagatgagaaatcctgacttaatggctaattctgagtttactgccaagactagaaataaaatatgatgtaaaatatgggcttacctgaaagtttcaggacattaaatgctgtaaggtccagatttagctgtaaaatgaacccaaaaaaaggaaggaaaaaaatcttatgaaagtaagagctggtccccatgtccaggttgtaagggatcaagacaacatgttggaaagagatttagtgtgctggtgcccctgcccccttttctttcttttctccttatttaaattttgcaataatacatagaatcactaaatatttaaactacaaaagaatcacaccttgttccttcaagcttctgcctcaggaaacacccagagaactatgtgattgcgatgaagatcacattagggaatgtaggcaaattcgctcactgagagcttaatgcattttctgtggcttagtggaatgtttgtgagattaccttaatgagtgaccaaacaaattcagctatatgtgtctctcaaaccaaaattgtataaaatgtaggtcacaggagttctggcattaaagaagttaacattccattacaatattcaaatgtctcaacttggacaatgattcattaagccattttgaaataaatttaacaaggcttcccaggctagctctgggaagccttgatatagatcagcaatctgtatagtagagacatagtaagggctgtttgaacaactggaacctcattctaccccacaaacagtaaccttaaattgcatcaagttctgtgaagttacataattttcataaataaattacctgatatgaaatgtgctattctcataaattggctttttccatgattaagaaagagaattagattaaacaagcctgttttaaagtaatgtgcctatttttccattatatattcacaaagttaataaagtaattgatattgtgtagactttgccaaaaggcagggcatttccaggcctcacaattaaaccaagatgtccaaaacagcttgcttaatgtattatttattgagtactgatggaatttaggttgtagtatacaacaacaaagcaaggacagtttggataagagcctctaaatatcatttcctatcgatagtggaattttaggtttatagaacagaaaaagaatcctagggatttataatctaacaaacttatgtaggagaagggagatttagaaaggagaaatcactgacttaccccagggcataactgccaatcctgagttagaactcaggtcacttgggtttctgaacaccacaatcttctttttcccaagtatctgtgccaggcttgcccacagtctttggcctgcttgcccacagtctgtaacatctttctgcccagatccctagcctctagccacccctaccacaccctgccctgaatgccaatgtaagattaaccacatttcaatataactttgactaataattttatccatatatttctttagagaaataatatcatgtttttgtattgtgactacattatcttttacttatattgaatgaaatggttgtgaaagctgataaatcccaggatcttcaactggcaagctggaaagccaacaggattgtcagggtcactctagtctgaaggcagacagctaaggttccagctcaagtgggcaggaaagcactcactcagcccttttgttcccattgggtctccagatggcttgatgaagttcaatctcagtatggtagacaatcagatacactcaaattttatattaatatcacccaatatcatcattgagaacatacccacatttatcctaaaattctgatgattgaaataagcaaagggaagaaaataaagtatttttcttaattagaagtgacctcaagagagtaatatatttatgtaatttagttaagtgatctaccgttggctgacaggattatttctatagttttgtgtatggaacataatgtacatacatgataattaactttatagaaactttattttctttatcattacaacttttaactattttacccttttttttcccttataactattaccacatttttccaacttttctgtgtggagataggatcttaaaatctttgtccttttgtgtgctgggattatgggtatataatactatatctagtgataactctatgatagttcaaatgcaaacattctgtatacagacctcagttttacatcatcttgtattttttttcatgtgttaattttagtcctcaagctatggatttttctagtttatttcatgtttgtgtttttcagagagtttggggttcacagacagttgagaaagccctgtaccacacatctgcttctctattctcaagagctccactagaatggtgcatgtgttgccaccagggagcctacactgacccatttctgcatcctaaggccgtagttcatattaccattcattttttgtgtgtgtgtgttgtgattccatgtgttttgactaatgcacagtgatgtgtgtgtaccattgtagtttcacataaaatcattttacccttataaaattcttaatatgctttctatgtattctttctttacttgagctccatcatgtcttttctctatttcatgaggggaaaaacatatttttatatctaattatgagaaaatatgagataattaattcaagatgttactaaaacttactatcagttgttagaatattttcatggaaatagactaaaacctgatgaaatcactaggtagttttgaggtttgataaattgcttataataaattgtacatgggtaaaagttatcaacattctaccaactgatatatatataatttcatgtaaattattgttatcattatagattattgtagtaacaatatgtaaatgattcatataaatagtctataatataactcagatcaaattattttgggtttgtaaccattatgcttgcatatgtgtgatattctgggaggaattatttcatttaagtgatagagtgaatacggcacttggacaacgacattgactgttacttccttatttgggcttttacttaatcttacttgatctgatgagctggactttctgtatgattgatgaatgagttatgaagtgacaatattaaaaataggattcttgtgataagaataaacattaacaagaattaaaatgatgactaaattgaaattgactatgaaattagagcaagcattttagaaaggcaactgtttgtatgaagcccattccaggccgactcaggaaactacggcatgtgtgattctgctcaagctcttcactaggttttctcacagtttctcacagaagtgaactgctgactgtctcacttgatgtctttaaaaggttccacagtcttgttatggccctttcctgccttcattctttcctgtcttcttttctctggaccacatggaagcatgctcatggcctctgtctgtctgtagcccacatctctgtatatacgtgatctgtgacctctctcagtacctctaaggcctctgcactcaagataggaatgctctttgcctacgagcttctcttcagatccttccctaattgcttttttggaaaatttgtattttgattacattcttagtaagggtttcagctttggggttaaaattctgctttttattataaaggagttaatggaatttttgttgaaagtaaagttttatttatcttcctttgggatagcctgtctctgaagggagagaactgactcctgctgactatgtcaggaacaatatcattcctataaacatcccaacctgtacccacgtataactagaaaccatttttaagaagtggtttagttaaatcactaaaaaacaatccaaaatagaaagagaaataaatataggttgtgtttggtcacaataaatatggacagtccaggctgatccattcattctacgaactccagaggacaccatatgtgcttggtttgttggtgggaggatgccacaattaggcttagttcaaaaagtagctctcttgttagagagacaaacagaaatgtggtgactgaagctgatttctgtttatatgtgactgattgggaggagagagagagagaagggtgtgtgtgtgttgcgaatgcagattctgactgctttaggagtataggagcctggcctgaggccatgattctcagatagccaggacagtacaacaggaatcatgagataaataaacttttagggatcagaattacaccaaacttgcgagctgagggaagtcctgctaaactcagtcacagagcctgtcagagtcaccatgctggtgacctttctctaacttgaaggatccagatttttttagagaaccaaagaatctatggggtgctggagaatctcactggaaaggtcataggctgatattccctaagtcctgtgacactttcccttaacaacgtgacagcaaaacagggacatctgtttctgcgtgactgcggtgcgaacacatcgaaaaggacaggttggggtttagtgcagccggtgacttgggacagatttcatatggagagaattccactctgtgtttctgaagtcaagaaaaagaggaagtgcttttatggctgtggcataggaggcccctctgcccttgatagcgctttctttttctaatttgtaaccatttcctggctggcgttccgttgcatgcttttttcatcagttactcaatgcttccatcagttaatggcctgactgcactccgtgagcctgcaagcaaggtctccgcacctgggctcctcctgctaatacatcacacagggcctgctgagggcctgggaggccagctggaacagctcagccccatgctcatccgtcatgattacctcgctttaggggcttgtctagcttactccacttgtttcctttgtcagcatgactaagatcaaagtgcaagaaggatactgagatgataacctagaactttgcccaaacgggggctatgatctgggcaacatcttccatcgcacttcccctaaaggcaaggaaggaagggacaaattatgtttaagtatagcttttcttacacggcctcctcttaactaactccacttcgatttgtttcctgaagccatcagagttgtattaatcaattggttcagggatttgagatttcctgacctaatcacaggatttgggaaatcctgatttctgtttatgtgaagctgtggttgtgattgctgactttgtacctgtttgacctcaccttgtttagtcaggattctggctttaagatggttctagccattctgaaaaagtgggaaagaatgtcttagaaacacctggaattgttggtttgttcatttcagaacccctctgtggtaggtgtgaatgccacccgacatctgtgcactggcagttgctttgtcccagcttttagtgtgtggagaattttaaagactgttgttctggggttactaatgaatgttttcaggtttgttgaacttatcagtatctattgctttctcttaaatgcctcttgttttcttcttcatgtacctctaggttttctcttgtatgttctgcttatgcatagttctttatttaaaccttctaatagaatttcctcatctaaaaatccatctctcctacccactctgcactccttgacagggtaatttacccaaactgcaagttctatttctattcccaggagtaaggacttatcaacttgacttaaaatgctgcccccatgtattacatggtcataactagtccacagagcctgtcccacaaaactgcattatttcataagtcatgctattggatgttccttgtctcttcattctcaacaatttcactgtgggaaaatattatttattatttcaaactatggtagctcttagttctcctttcttgtctgttgccatagacaactagccagtcttcttatgaggcaaggtacatactgaagaggtcagctcagggcatttggaaaattccactagacccctccctcctggaagagaaaggtcatggagcattaggcacccctcccctctagaagggagaggcttaattacattcctcagaccacagagggttggggggactgaccattggccacctgcaagtgggggaagcccagaacctgtagacacattgtggaccaaccattggccacctacagataagggaagtcttaacacctcattccctaaagaccaatcagtttaaaagtcacactattctgccaatcatattgtgcctaatggctgctgctctgaaaactgtataaaaactcgccaaacatgctgcacagggtcattctctttcctttgtgtgcaggcaatcccagcatgctggaacaataaaattcatcttggttttgcatcgatccccgactctgagtctttcactcagggggtctccagtaagttaaggcttgccagagtcttacaatactataagccagccaactttccaatagaggccaaggacaaaatcccacaactctcaggaagtctatagagattatggtcagccattaatggcccagccttctgttgatcaaaaaaggaatccaagtctctcattttaccttactgaaaggacctcctagaattctgagtctcaggtttgtaaataagagcctgctccctggagtgtattactttatgtggtccaaactgtcttcccattcctggttattcactggatatttggaaggggagaggatgtgtcaggcatgtagtaaggtacatacttggtatatactttgtagcttagtatatacttggtgcttagctgagcttcctggaccactgtcccgagtgtggtagaacaaccctcttgagtgttcatcactctcaccttcagagctctgtaaacacacacttttggatacaccctaccctagagcatctgagtttgtaaaagggggaggaagaagaacacattttcaaaacactccttacagaattcacgtatgcagaagcacaatgtttttctgggttgtaaggaaaagtgccatgccttctcacctacatggaagctctcagtttgtcttgactccctgtcttaaattcttgttaattctaaccctcaacaggtggcaagctcttctcttcagtgatatttttaaatatggtacagagcagctgatacttgccactcaccagtttcttagtaatttacttcttcccttatagttttttatctgttgacctttatgaactcttggggagtttgtgaataggcttcatttatctcatttctagtgctggcaccatactcacaggataggctgttggtgccctgcccacttcccttggctctgctttacagccttttcatatatctaccctccaacttcttcacactttctctctaccaacttgagctaataccttatttcaggagatcaaatttgaatttttggacacatttctttctcacacagggaaccatgacattttctaaagtctgcctctccagcagagggtattggggctctggaaggtacagtagtatgaagcagcccagcaagcccttccctgtaactttttcctatactttggatattcgcttctcttctgtgagcgtggtggctttgaccatttaagcttttagagtttcaacattttgaggttttacttcttcacaatttagtttctttggagttttaacttcagggattttagactgtacagtcttttaggactttaacatatgtggttttggcactcaacactgactttcagggtcatctggaagtactgtgtgttcctgcagatggctactctaaacaaccctgaaatggtgagtttgggaagcttgggtgctaacatggagaaactgcaacctctttgcagtataagaactctcaaactgctagggaaagctatcgtggttcctgatgaagttatacagagctaccaaatagctcagcagtttccctctgagcaatatatgcaaggacactggaaacaggagtgtagaaaagttctgtgaaccagcaattacagtgacattatctatagccaaaggatggaaacaacctgaatccagaggccaagcaatacacagtatacaatggaatatgattcagccacacaaaagaatatagtgatggttatacaatgtggtaatgtactgaaagcgacttgtctatttagaggtggtaaatggtgattttatattttgtgtattttagcatcgttggcacattagttcatatctgacatttttctcttcctgctccttctccacacttcaatattatgtcactaacattcttacatatgggaagtacaagtgtcttatctgtggccatataaacaatacctaggcagctataaaagttaagcatcatttaaaggagaggaaaaataccacagtgcacaaacatggatggatatgaaagcaattagatggctagccagtcctgtaggtcttcttagaatctgtatcccataagtgcagtgaatccagcttagttattgacacgaaaagcagtgcacattcagggttttcttcagtattcctatttgtggttctccaaaaagctgtgcatatgggtgtacttgcttatagcccagtggtctgaagtcaggtactccatcctcttacgtctcatgtctttctgaaggacagaaatgtgcccctaggagaaactcgttaaaagtctacaaccctaattcagatgtggcagtgactgtatgtggtgtccaaacattttggtgtaagcagtaaatgtaaataatgcttcaaatatgtaacgttagctcttggttttctgtgtctccaggcaaaagtacatgtctgtgtctatacattcaatttggtagtcctgcgttgtctaagctgtctttcccattccacagtctcaaagtttcctcatttttattgtgcagtgaaatgagacggaagaaggaaaccttaaggggtggatgtgtttccggacagtgccatcaacaagtctgattaatctctgtaacattcgctctggcttctgcatcgtgtacttttgtagttttacaacattatcttaaacactgtttggttctcatctgggcgatccagtactgtgggtttctgggacagaaggcttcttctgtccagctctgtttgccttgagttccatcaaagaaacatagtagcaactaaaggcaaactccttttcacatttccccaaattgtactcagtctcatacttatttgaaagaaagatctttcgtgtgtcttctggaataagacaagtcataaagagataaaataataacacattaatttaatatagaacacttttcactctgactttgcaccctgagtgtttatcctacttttgtgatgtatactagttgtgtggttggtttatggttcttagttgaaagagtaagaatcaagaattgacaattttattattttaaacagcttgatgtcacaagtggctgattgttttcttctcaatataaggactgaccctagagtcgtgcacatgctcagcaactactctgtcacttatgtgtatccctgataatttgttttaacattttgttgttgctgctgcttacacaactctccctatatttcccaggctggctttgaagtcactctgtaactcagatgggccttgaacatacaatcctccttcagactctgaagtatctgtgtttataggccctgtgctttcaggttgctggagccctattgtagagggtagagatatccaagagttcacttgagaggtcttaagcacagattgaagctgaccatgtgaaatgtttaatcaagctctaacatgtgaagaacaaatatacacacataactcccaaatgtatgtatatatgatgagtagattacccctttgattattggatagacttttttttttcagataatggcacaataacaaagaaataaccaggaggcaacaggcaggattgagagttattttgtgaaactgaaatcttgttggccatttatccttatcatacaatgcaaagaagcagttaacagcacccaaacaaacactccttataccagcccagaactcctgcaaagtctcagagacatggatctttgggtaagtaggaacgtgatacaccagggattttcagttcccaaggagtgattgattgtgccaaaagagacaaattaattatttccaatcagttgtccaaagctctatgttcaactgtgtgttcaaaatccaaaatgtacctttgtttatttacctccattgaaaactctgcatagtgaaactttgttgatgttcagcaaatccctgctgagaaattactagaactaacatgtctgggaatatttgttttcaaatggattcttaaattgaccttgatagttttcagtgtttcttaattagtgtttgcaaatctgctgatttttgtgaagaatctgtttcttgctgtattagagtgtagcatcacaacaaaattagcattccatatgttgttctgctaaacatacttggtagctttcttgaaaaatcccttgggaaatgttgtgaaatttgttgaagcaaatatgcagtgcttgaaaataaatgatggtaatcgccacattgttatttctttaacacattgtgtctggactgatgagaaatgctacagctgaatacatgcagtctaaaagttattacctgtgggacaacctttcacctagactactgaaaaattttgttacaaaattcaaataaggccatgatgctaaaggggtgtgcccccccccccggattaatggctggatggtgaagaacaatggaagctctcactggtgctcttgcttcttcatgtggaaggaggaaccctagctcaggttttctaacatgcccttcagaacttgtaattcatggactggacagatattttaggagttaaaagcactgagttttcttctaaagccctggggttatagtcccagcacccacatggcaatttatacttatctataactccagccctaggggatccactgccctcttttggacttttggtcaccaagtatacatatagtgcacagacacacatgcagatgaatcattcatgtacataaaataaaataataaaatcttaatagaaaccaagggatctatcttatagaatactagtagcaatgttcatgttaggtactttttgaaactaagatgttgagatgtggaaagtgttatcagatctccacctgattaaaatttaaaatttagtcaatagagatattaaatatctctatagagctgaacattaagctaagggctcaaggttcctcataagaataaggcagacatagcagcttcagcatcttctttgaggatgctatggacaaacaggaagtaatatgaaactccaagcccagatagagggccttagggtgacatcccaggtggagattctcaagctaagtcttataggtgatcgatagtacaaaaagcaggggactgggattccaggctgaatgactgtccatataaagcattgatatgaaagagtgtgctgcctgaagtacagcttcaaggtgggccatgtggtgacgatatgataggggaagtgtagtcagatttttttctgataggctaagaaagtcaactacatcttatagaatagagagagactttgaatcattttaagatgggactgaaactgattgctctgaaagggggaggtgagcacacaggtattcattaagaagctggcataacagtcagacatatagtggtgagggcctgaacttaatcattatagtgacagttaaaagggtcttagacctgattaacactatgtttaaaaacagcaattttaatctaagaatgatgagaaacaagagactcaatgaagcctgaagtctggggctggtccatttaagtggttggagggcaagaaatgagttctactttgcatatgttgaagttattcttggacaaggtagaagtatctattccttggctctgatatctgaagcagttcccgttccactctcggtgacttagagtccaagcaagtgagtggcatttaattgtaatcacctagtggtaggagactggctttgatgtgccatcaaaggaaggctctctaactgcttgttctgttctgatgtttctcatgagaactggtgggtacccatagacatcccttcactttgctatttccaggggtatggacattgattttccatattttaactcttttagtatatgtgctgccaaagcgaggaccatattttaacttttaaggtttattagctatttatgtttagctaataatattagttctttatgtttgatccccccaccaccaattcttcttcatttgctttcccagaagtgaagtagcttatatttccttgttctcagaaggtcttgtcaagactttagaatttagttcttctacttgcttttgatacattaggtctaggaggtgctcaggaaaggttatatgccaggacgggaacctgtgtggcttcctatacgtcaagtggaggaagtttccccctctatagaataaaatgtgaaggataaagaataactactttaaagcatgctttgtaaaagagtgttatggcagcaagtggaacaaataggaagtgatccttaagggctattggaacccaagcatggagttattggtacttaaaactttacagggggaagccttagtcagagtttgtttcccttggggcagccatccccgctgtgcctttctccacagcaccttgaatatgcccccttgcaactaaggcaaatgccaaacaaaataaagctgctctgtgcctgcaaacgtccctgattcaattcataaatactgattagaactttaaagtacagatccctaatccaaattttcaaaatctaaaaagctataaaatctgaaacattttgagtactaacaaaatatagcaactggaaagttgtactttgcttcatatacaaaggtattagaaatattacccataattatcttcatgctaccgtgtgtgttatgtatgaaacaaagatcaattcaatgtttaaaattgtatagtgttccttatatatattatgtatctgtaaatattctaagctcctatatatcaattttttgtaggtacaaacatgtcatataaagaacactctggttaaaaaaccaagccctgatacaggtagaagaggggctggatggacacagataatacccttagtctgcacatttcatggaaagtggtggttctgtttatacagtggggctatctcgacataaagagtaaaagtgttggaatatagctccagtggaaagcatttgcctagaaggtgcaaggccctaggtttaaatctctagtaccccaaacaaacaacaagacagtagctgtgtttgatcctgaactggatggagagatgcagaaggaaagccaagtgaaacatccattgtagccacctgaaatctgctctgtagactttgcaaagcacatactgaatgcaggcctgaaccgatgtgataaacggaaatatttgtttcagagatatgaatcttacattgtacaatcaaatgtacataacttcccctgcataagttccccaagtgtccaagacaaggcactgaatatagataatatgaatggctacatatacttaaaggaggaaaaagtgaaacataccaaaatgttaataatgtttatctctggggattaactgtgaagtgctttttcttttttggtacagatatacaatctcaaacaatcagcctctgtagcatttatgatcaaagaaacattattttgccataaaagaacatgtgtatttaaggtagggaaaaacatacttgagatttttctatgtaaaacttaaattcagtttcttctatcattgtttgtatcatgagtcataacctcactttcctttcataatggagatatgcatatcttttagaggactacttattatattggagattaagataattatataatgtagaaagtactcactattagtctaggttaatagtacttgtgaatatgttcctaaaaataagaggggttgacctaactgcttgtaccaactattggaaggaagggctaattttcctctctgttagtgaattgagcactctaaaaaacctacttattattttggagcagcttttagtatactaagaatgaaaataaattttcattcaccagaagttctagtatattctgctctagggacaaagcacctgctatgctctgtgtaagtactaccagatccattttcctggactccaataagagtggtaacccagggatcatagacaaaccctccagttagaaaatttatattctaaagaattcacatggataccagagatatgccacaaatagagaaagacagtcttactgggctaactcttggaaagttaaataaatgatcagaacttggctggagaggtggctccatgggtaaaatatttgtggcataagtttgcagagccaaattcaacccatgtgaaaaccaggcatggtagtatgttcttagaatctcagtgtccatgtagcaaatttggaggctgagacacaaaagtcccaaagtcttgtgggccagcaaccctggcgttcagagtggcgaacagagaaggtctgtctcaatcaagttgaaaggcagggaccagcactcaggattgtcatctgaccatctcacatgcactggtacatgcataggttcatacacatgcatgttagcaagcacatattgtacacacaacagaataaaaaatcagaacttactgttgtcatcgtacctttgtagtagccttcattctgacttttcttataaccatgcagtaatatccccaggttttccttctttgagacccaactttactatgtagtccaacctgggcttcaacttgtaacaatctttctgcttaggcatcttgagtgctgagattatagacaagtaccgctagaccaaaccttggaacataattttgactaggaaagtaaaagtctaataattttgataacgtttttgtggacaggaacagacattcaccatcaatctattagtcatccattcttgttatacttatcacgtccttattgactaggtattatatgctgagtattgttttaagttttgtgctaaggattcatggttgtactttatgtaaaaatcctatgcatttgattttaagcacctctcatgcttaaattatctggaatcctgtgctaatctggccttagttatcgttcttacctattcccaactctttctcacactgcttcatgtccctttgacccttctaagtacactaagcaagatcatgctttggtgttatgttccctgtgctgcttgcatggatagtctttctacagacattcatgggccttatgctattttattaatgagtctgctcagatgttaccttaacagaagggttttctctgactacctatttaaatgccaactcatagatattctcagttcttgtttcttgctttgtgtgtgtgtttcagtatctataatatacatatgtaaataatgcagttacaattctcatatgtgtgtgtctagcatatagaatagtttcattataatgtgtattttaaaatatctttttaaattgatgaataattctgcttcacttctataatatagtcttcttaatattgggtaaatatctttgcttagcactgaagtaaaccaagactaaataacgttgttgcactataaattattaagtaggctcagctataatggccagttacttagtaaacatacaattaatattaagcttgtgagttcccttctttgcttcttgttttcaggacatttggccgttgtgactttggttttgtttctgctgttatttttacacagtgttaatgtgttcctgacatatttcagagaccaggcttgtcatttactttgaggggcccatgaatttctctcttacacttttgaaatgaaatttcagaattgaatcaaatttactgtttcaatcaaaatggatttgaattacagatgtctgatcctttaaaaacagatctaaaaaaagaaagcttccatcaacttaatttcttgtctcttacaaacaagaaccaagaactctttataagacctttattgtgctaaaaacgatccatgtatgctaggctacgtacatcatattcaattatgttttaagttttgtttcattggggaggaggcataatccacccacaagttgggtatgctttttcataatgtgataattgctcataaaaaaggttttaattgaaatttttatgttatggatagcctatagcaatcttagatgtgcatgtctatatttaaatacctataatctgtttttttacagattgtcttacaacactattttggaattactaaggggctttctttcctttttgttgttcatctgggtaacttaaaaatattgctgtatgttcaactgttggcactgatgcagacaactaaaagcttaagacaatgattaccccccaccccactgaaagccacatctaaaacggccacaaaaggaaacacacaactcaaataatctccatgctgtgtctgagattaacttagacacagatgtttcaacttacagtttgatctagcgtaatatatacatttaacagaatcctgttttgtattgcttctataaacactaaggtctgataaaaaaaagagagagagagagagagcatattgatttttctgccatttaggagcttttgaagcagagcttaaagtgccagtgctcccaagtcctcaattaactctttcagtggctgtctatagggtctgtggagtctatgtgtacatgcaagtatgtgctggtttgtacgtggaatggattagaacagcaagctgtttgtgctctgcactatttcatttgctagggatgatcattcgactttgttcttgacattttctcttagatgatgaaatgattcaacactgttcattactactcatttcccaagcacacggcaatcattacatacccagatactatctgaaacgttactgcaaataggaatgaaacatgagtgggttcttcttgcattctgaggacttcctccagtcctcagaatctttagtttcgctgaccttcgagtaagtattatcaagggagtgacgtatgcagaatgagtccagtataagtctgctttgctctccaggatgttcctcctgttcttccaggtctgccagcattctaacagtgcaggggccatgtcccaccttgtgtgctgggagtacagcaagtgaactgctccaaagcagagttacaacagaggcatcatggggggaaatgagatgtccacgtttaaaacaccaaaacgatcatcttcagtaaatcaacagcataactgcttaaagctccagaaagttagatgaactcttttattatagaaagtcacgttcaaagttagacaagatagacgaacagtgaagacagttggactttgtcatttacaaaagatcttcatgtggatgactatatatatttctacaatgtgtattttcagtatctccattttacaaattgatgatcttgtttctgacaagacaaatctgaaaggcaagattatcaattctgtatttcttttattataccactgcgatctgtatataatgggcaaacaagcacattatccagtggaaagttaatcagatggagttctttaaatgctatattatattccataattttaaatttattattcaaataatattgattataattataatttctctctctctctctctctctctctcacacacacacacacacacacacacacgacacatgacaaaagcaatgcaaagtctcagataagaaatccagtaaatttttcctcatgtatatatatgcatagagaaaggggtatacctgaatgtacctacatgtggaggctagaggacagccttgggggtctttcacaaaaaacccactatcacccactttgaggaagggttcattgttttggagaactcaccaattaggtagagcattctgaggctgggcagtgaatcccaggaatccttccatctgtcccttgccagtgtgggggttagcgatggatgtgcaccaccccaggggacagtggtccacagcttgtgaaataggtacttaaccaacggagctatttcctcagccaagttttgcttttgaaatgattcctttcatatctgaagatatttaacaaaacatattgaaaataaaaaccagtttcagtaataggtagaagacctgccttatggaagagttcttcctcagctacttgaagtagtctgctccagctagagttacagagggccagcaagtggccagcactgttaatgtccattgctcacataaggagtgtcttagtcagagtttctattcctgcacaaacatcatgaccaagaagcaaattgggggaggaaagggtttattcagcttacacttccatactgctgttcatcactgaaggaagtcaggactggaactcaagcaggtcagaaagcaggagctgatgcagaggccatggagggatattctttactggcttccttcccctggcttgctcagctgctttcttatagagtccaagactaccagcccagagatggtttcacccacaaggggcctttcccccttgatcactaattgagaaaatgccttacagttggatctcatggaggcatttcctcaactgaagctcccttttcagtgataactccagctgtgtctagttgacacaaactagccaatacaattgaccccttgtcaactcgacacacaaacacatcactagtaagcctcaacccttaatttcttattcatccccaagatctaaacaactttcaaagtcccacagtctttacctattaaaagtcaatccctttaaaatgtccaatatcttttaaaatccaaagtcttttacaattaaaagtctcttaactgtgggatccactaaaatattttcttccttcaagagggaaaaaatatcagggcacagtcacaatcaaaagcaacaattaaactccaactgtccaatgtctgggatccacctcacaatcttctgggctcttccaatggcttgggtcatttctccagccctgttctttgtagcacacgacttgtcttcttggttccagctgcctgtactccactgctgctgctgttcttggtggtcatctcatggtactggcatctccaaaacgctgctgtcttccactgtaactaggcttcaccagtagcctctcataggttcatggtgccaagcctcatctccttttcatgtccccttcagtactgggccatcaaccgcaactgaggctgcactttcaccagtggccttccatggcctatcacaatgccaagcctcagctgctctgcatgaccccttcatgccttcaaaaccagtaccacctgggtgactcttacacattaccaagtccagccacagcacaagttacaaccttggctatctctggaacacagcctctgtgctctcaaaaaacacttcccagaagatgtcacctcaatgactctggtctcttcttaatcaccgctaatttcttagttccagctaaccagcatcaatagtcccagtaatgcaaagtttttgcttcattagttctggtatctttttaatcacagctgattcttcagccccagctaaccagaattacagaatcttcacaatcaaaacagcaatggccctgataagagtctttaatcttacctctgaaatttcacaagccagacctccatcttctgcactgttctcaacattatcttccaagctcctacacaatatctgacagagctcttaacaacaaatggatctggccaaaagttccaaagtccttccacagtcctccccataacatggtcaggctgtcacaggaataccccactatgctggtaccaatttgtcttagtcagagtttctattcctgcacaaacatcatgaccaagaagcaagatgggaggaaagagtttattcagtttacacttccatactgctgtttatcactgaaggaagtcaggactggaactcaagcaggtcagaaagcaggagctgatgcagaggccatggagggatgttctttactggcttccttcccctggcttgctcagcctgctctcttatagaaccaaggttaccagcccagagatggtttcacccacaaggggcctttcccccttggtcactaattgagaaaatgccttacagttggatctcatggaggcattttctcaactgaagctcctttttcagtgataactccagctgtgtcaagttgacacaaactagctaatacaaggagcatactaaattccttgtccaggaatctggctggaaaatggcactgtacagttacagctcttaggaaagcaaggccacacatggatttttaggttttaggcatgttttaggtttgtttgtggatattttaagtaatttatattttatgagaagaaaatatctccctttttgctgttattgttgttttcctgggctggaactctgtaggttggcctcaaagtcccatagctctgcctgcctctgcctcctgggtgctgggattaaatgcagatatcaccatgccaccttaaataccttcctttacaagcaacatggaatattttcccagaaactctgaagtatgtagaagagattctgtcaacaacagaaaaaaactagagggagggaaggagggagggagaggagagagagagagagagagagagagagagagagagagaaagagagagagagagagaagagagaagaggggaaatgaggagagaaagaaatatctgaatgtggggtttgctatacactagccatgtgactttggacaacttaattttccccactgaactttttttttaatcagtaaaccataaataatagaaccaactttgaagattacatgtaatttaaaaatgatagtcatttaatttgcatgatcagtgggaatttgggtcattcagaccctcatcacaggccttaatactgccaatcattaagtccattacctaaaataccaaaccagggaaaggagattgtggtgcaacgattttggactgtaaagggatgcaacctaagtataagtgcaggacagtttgtaagggaagtctcagtcttctccatgggattggcaagtctttggtaagacagtactcaccactaagtgggttagtaacacgggatatgtcaggacctctcccatgtgtctttgaattatatctgcacatcctatccagcaaactggcttttattatcttcagctgtgtacagctagcacgtctctgcaggaacgagatggatctggttctgcttctcacttccctgacagaactgtcagttttatttccatcatgcaaccgtggtagcttctaaggttgtcagaacgcaatgtttcccactccaggttgaattggcacagctggggcagagaggagccatctttagacttgtgaagtgagcaacttggactgagaaatcgctgagaagatacaaatgtgcatttcagtttctcctgtgaaatcctagttatctgaaatggggactaatcgccaaacaggaaacttgaattgattgattgatctttcagagctatatgaaactgtcaggccctctagtccttttgtcctgctatatattttaactgcaatcatattgcatgtaaagctttaatcttacataacctccaattttgacttaaatgggaactatgacttttcaatatttaattggaaaactagagtgaaatttatgaagttataatagttatgtattaaaaattgagaatgtgttttcttcactagctgatgtatagcttactgtcttaaaaatgaggattgcataatttccttgtcataaaaccttgttttctaagcaagtaaaatgtgaatttagaaaaaaaatacagtatagtagtagctcactcatatttttcattgaattctagaaaataagaatgcgagcttgcttatgcttttactccttgagttgtttcaaatatttggtggatatactaagcatattatagtgctgttttcttagaagagataaagttaactgttttccttaaggtcacatggttaacatgatagatacatagattttcatttgtctattccacaaatatttacagagtgcccataaagaataaattgctgaataaatagtccttaagaatagagatcaagggtatgaagaatagagagaaagggttttagacaagaacagtaggaagggctctgaggtactgaaatacttgaagagcctgcagaactcaacagtgtggtgagaggttagcaggggggaagcagaaaggaatgagacacccagaaaaactgaggtgcagcaaggttgagagaagtttcttgtctttgtagtgatcttatgtttaagtccaatgtcacagactgctgtcaattttgagaactgtgtgatgtatttaccttgggatactgctcataatttttttccttcagatttttcatttactactaacattttccactcacatttttctatgtttaattttcttctaactcattggaattatggctatggtgagagtgaagaagccgtgggtttgttgtagatactctgctctggagaaagcaatttacttttataaatgcactattttatgggctacagttttccccaaaagttatgggctacagttctttcccatgtaaataacagtgagaaaaataccaaacgaacatttttcccctcatggagtgtcttagttaaggtttctattgctgcaatgaaacactaggatcaaaaaccaagttgcagaggaaggggtttattcagcttaccctttcatactgctgttcatcaccacagaaagtcagacaggaactcaaacagatcaggaacctggaggtaggagctgaggcagacaccgtggagaggtactgcctactggcttgctcagattgctttcttatagcacccaggaccaccagcccagagatgggaccacccacaatagacttggccttctcctattggttagtaatgagaaaatgacttacatccggaacttatacaggtatcttctcaactgaagctccttcttctccgatgactctaccttgtgtcaagttgatgtaaaaccaactagtacagggataatctgattttaaatattttttgttttgttttatgattgtttgtttttaagatctttagggtgactcacaaccacctgcaacttcagctacttcttttggtcttccaaggaacgtacacacaagtgcacatatacagactgatttataaatctttaataaaatagtatttaaatgtaattatgctctgcatacttaaggcaaacatcttaatatgtgcaatatgttaattattgttttttaataacactatctcaagggttggaaattttgctaactggtagaatacaagcctagcatgcttgagtttctgggtttgatttccagtagtaaaaaaaaaatattgttttgagtcctgtgtctaatgatttttgaatgtggtaattgctcgtaattattttactaatctgaaagtctagattctaaactttctgtatatgtaagcatatatttgtccataaataggcatgtgaagctattgcctatgtcttcacatcaaaggtatcatttgccacacaattttgcactgtcaatactataacatgcttatgaatgaagggatactaggttaaaatcctttaactggaatctgactttcatattgttagatgcatctagagttaaaagcatctatcagtcgctcttctgtcctcagaagagattttgtcagcaccaatccctgaaaataaagtgtgactatgcagtattctaaaattctctgggattatggaaagctaaataagctgatgttcatcacatgtctcaggaggacatagctacgaggcattggtcacatagctgtagattggcttcaaatagtagtcaaccttggcccagcaatcccaagtagaaacccagggatttctctcctttgcttttgggataacaaggcatctgttccattccaaacctagctccttgctaattgctggggaggactgaattgaaggctgggtgctgagagagtgctgacagctgtcccgtgtggcatcttgcttcctgtagtccagatctggttagcattaccagtgttcagccttggccaggatgtggtcaacgtgcactggaaggtgtattagacactgcctctccaggaggaatgtgcctgaaaatttatacttcacatgcaaattttagcatgcaaaatcacttaccaaatttttgcagggacgagatgattggtctgtcatcaaggaaaatattacttttctttccctaatggaataagaaactattcacagtgcttatagtgtacatttgaaggagatactattcattcctggaagtatttgggaatgttgtcagtaggttgttgagtttcattccctggcagtcagatcactctgcaagtcaagggacaggaagatgatgcgttggatggacctccataaaggtgatgcagacagttgccagacaaacattttgaagagcctaaggaagacactgcattacatgccaatttaaaatgtgcccagccatacttagcagcatcgattttaatctttagtttaaagagtaagggtggagaaagcatgggtaatacttttggaagaaattactttaaccacttcctattactgtggtgttgactttccttataaatagaagctaaactgatgacgcgtcagttctctgctggatttagattttagtgatgctgtgataaagaacaaaatcagactgcatctaaggaagcacagataaatcaaatggtgttacagatagcatcaatactggcatctaagttctatggaacaagaaaaaacattggatatggtaggtgatgttgcatcataaagccagtgcccctgcattatttggaaagtgatctgaaaaactcaagcacagagggaaaaaggttagaaacagagatgtgtctcaagttgtctgaatttagatgttcattattttaggctttagttgggacttctcaaaactactcactcagcttttgctaataccagagtaccttaaaaacaaatcccattttcaccctactacagaaaacagctcttacgggcccctggctttgagaggatttattctgagatggtccagtgtcaaacaaccaatgtagcaaatttgttatttttatgacaaaagattctgacaggggttttccagagtccagctgtggatctttaggttgccgccatgttattcagaacagaacaactgtttgaatcacagccagggatgtccgtgactcatttggtaacagggcactaatgagctctgcagacatttcaaattccttttctttcccctttccccctcatccttagtaaccaggtgtgctttaatccagtctgttttcccctaagtaataataaacattctctccagccaccttcacacacacacacaaaatttatatgtcataagtattttgtatggcaatgtgaatctttcaaaactgatcatttaaataaagagtaaatacttcctatttattaataaatatctaaaaagattcagatgccaaattccttaataatgccataaaacaacttgtaggttttggagatgagatgtcttgaaggagaaatttgcccagaatgtcccacatagtgtttaatcccactcccctagagccaggcttttaaaaccctcatgcccttttctttggagaatatgattggagagcctccattttctcttttctttttggtgtgtgtatgtgtgtgtgtgtgtgtgtgtgtgtgtgtgtgtgtgtgtgtgtgaatatgtgtgtctgtgtgtctgtgtgtctgtgtgtagatgcagttgcccatgggagcacatgtagaagcccaaggttagcactgggctgttctcaatttctctctatcttacgttattggttatatattttggtagagggtcaattactgaacctcatgatcacaggttggctacaatggctatcctgtgaactcccaggatccacctgtctctgcgtcatcagcactgaagttacaggtgcatgctatcacacctttctttcttttaatgtgggtgctagggatctacactagcctcctcctgcttgaataacaaacctactgaaccatcttcctaatctgacctatcccattttcctacctaaaactattaggtaactttacttacctaaagtgtttaaaatgtgtttatgaaagtcatcattccaaaagcatgttacatgatgacacatattttttatctgctgtaaacattgttccccttctcatacttatgtatgaccagtcaccatttatagacaaggtttcagagatcagcgggtctccatgtgaatcaaacctgtggatattggcttcaagagccctctgtatattcattttatattaacaaacaatttaatactatattgtacattttaattgtaaatttaattatttattgtttatcagttctgcaatgtattcagcataattatagatagactgctaaatgacttaaaatcacattgggttttaattctgattttgtttgtgaatatgtctgctactgtgaagtggggtatatggcccaataactcgatacctcatctgtgactcggctgtctagtttcacatacgtggtgtatttagcatgaaccattgcaaattagtaggtgagttgctaacatatatggtaaaattatcaccatagctctgggaaatcaagtttgcatagaagacatggagttaaggatattgagcagcagaaaaaggattcatcttttttaggctaagtgactgtacctgacatccaatcccaatcatttgaagcaattttctagattgtccctatcttttaatattaatcattttatttttactatgctagcaataagttgctgtacttttcatagaaaggaacaaggcctctcaatcctttctttgttttggctggcttttttctatgtataatttgatgaaatagtttttaaatatgtctcacaatttttagaaaactaatcacaagtagatgggaaatagaaaagaggtgatatcatatttggattgcaagttgcttcaggagaagagttcaactaatttctttcctccagtcattggtataggtagactatatcaatttctcctgtgtttaattccagaaattttgtttattgactagccatgtatagaatgttaaaagacgatcagaagtcaaaaagtctcctaggcttcttcaagtgagtcacctttctctgaagagcagtgagtcagatttgaggctttcctgtgtcataaaagctggctatatttaagagctgcaactgttttttgtttgtttgtttgattgattgattattatttattggcatttgccattcttttcataaatagtaaaggatagccctcactctgtacataaaatcaaaaatacataaaaaaacaaccaataaagcttacatagctcagtagcagaaccatatgtgtttcaaagtgttgaatgtgatgtaaggtttcgatccagaggtataaaagtagcaacctagagagtgaatgtaagctgaaccttgcagctttggccactaactctgtctttaactgtcaaataaggagacctggagagagaaagaacactgggaaggtaaacaagactaagtataatgacatatgtgtgaagacatcacaatgaaaaccaaagttttataagaattaatgttttaagtaaaaaagaagaatcttacttgcttcttcatctctcatatcactgctttagctaagagttctggcactgtgttgaacaagagtggagaagatgagcatcttgtcttgttcctggttgtagtggcaatgcattcaaatctcttcacttagcataaggttggctgcgagcttgtgtatcacttttaatgggttgacatatgttacatgtatctctagactgttcaggattttattatcagttttgtcaaaggacatttctgcttataacaagagaataatgggttttttctttgaatacttctgtggtgggttacatttgttgaggtatatatgtgtaagcatcaatgtatcactgggatgaagttgacttgatcatggtggatgatcattttaatgtgatcttgaatttggtttgctagaagttttacatctgtgttcattaaggagcttggcctatagttcttgttttggctttgtctgtctggttttggtagcatgctaatattggttgtgtaaatagattttggaagagacattttcttttatttttgcaataatttgaggcatattgctgttcttctttgaggagttggtacaatgctgtacagaatccatctggatctggaatctttttaagtaagcaggagaccttttttaaaaaaattaaaaggttatctattcatttattttagctacaagagtttttataaattaattaattattttatttacataacaaattttgccctcctcccagtcccccctcacagagatcttcccctccaccctttcccctttgcctctgagagggtgcccccccccagtatctcacaaccctgaggcatcatatttatacagggttaggcatatcttctccctctgagaccaggcaaggcagtcctctgccacgtatgtgcccaggacctcagaccagcccatgtatgctctttggttgttggttcggtctctgggagcttctagggttcaggttaattgacacttttggtcttattatgggactgtcatccatttaaattctttcaatctttcttaggtgggagaattttaatgactgtttctatcttattaatagtccttggtcttttaaattaacctcattttgttttttcattggcaggtcatgtgtatctagaaattatccatttcttttaacttttccatttcagtagaatataaaattttaattttatttcccctgggttctatgaatttctttgatatcatataatttctccctttttatttctaattttattattttaagtctgctttcttcttttggttaagttgcctacagcttagatatgaaactctaaaactactgtaagaaagtataaggaggaaggacacttcattatataggttcaggtaaaaattttctgaatacaacttggaaattgtgatggggagtgcattgaatctatgacttgctctcagtaggatggcattttcacagtactagtacaaccagtccatgtgcttgagaggtctctccatcttttggggtcttattttatttctctatacagtgtcataaccattttaatttttacttcttaggttatattaacttcaaggtattttaagctattatgaacggaattgtttttcctatttcttagtatgtttttcttgatacatagcaggttactgatttttgtgtgttattagtatatcctgctactttcctaaaatgtgtttatcagttttaagaagtttcaggttaactctttagggacttctattgataaagtcatataatcagcaaataaggacactttaattccaacatggtgactccaattccctacttctgctaacagatagatcacctagacaaaaaaataaaaataaaataaaaaaagaagtattagatttagtgaaatagcaatgcagaaacacaaagaatcaatacatgaaaagttgattctttaaaaaggttaacaaacttttgatgtcccgatcctatagaggctccatatatagctatgcactccacagtcactgattctcagacctgtgaccagtttcttgtttcagtctgtcatctatacccatcaataatgtgagctctagggaagtgtgatgtttacctattgccaaccattcagttctcagcacttagaatgtgtaggcacacagtaaatgttcattatttcctaaaagaactatccctgatggttttgcacattggctatgaagattatttcatacagctaaactgttttacatgtatccctcttttcctacaagaagctggatcaggtaagtgaattatttcagaaggaaagaagacttgagaaatattgaccacctaatccataagtcctctgcactggtcaggaaggcttctgtcagccaacacaggggccatgcaaggatacagggaagctcataaaaatattctctctgccttcatggggttcacaaggctgtggattacttgttttctaaaacaacatttttctcaactctattaggaccactaaatagtaaatgaccaaacattatgcgggaaacattttaccacttgtagacagctagtccatcatgtcgtgttttgtatggttaaagtcatttattgatttgcagatgctgagggagcatttcacccttcaacatgacaactcaacccatgatttgcagatttctaccatgttggcttgtgatatggtgctgtagcgagccttcaagcctgtccagccctcctcccatcatgctaggtcactgatgacatcccctagtggtcctaggtagagctagagtccttctaatggagttgaggtacgggaaacactatgcattcgctctaattgagtcagacatttggaaagatccacacacagagtgatttgatgatgtgtggatgctgtagcacttggtgtgtcaagaccctgtaagactcagtaaagagtttccaggacaacagaaacttaaacagagaacccagatggtaagattgatcaggcttagaacacagcagcaggtaaaatttaaacaaaggcccctgggttggcctacagaagctttcctggcaggtgcagaggacttatggattaggtggtcagtatttctcaagtttcttttccttctgagataattcacttacctgacccaacttcttgtaggaatagagggatacatgttaaatagtttagctgtatgaaataatcttcatagtcaatgtggaaaactatcaggaacaaagcctcaactttaacttgaccatccacatttcttgaatctttaattgtgaaactattccagagcttttgctctgcaggctttccttttgatttccaattggagatttgtgtgaaatgctcctgcaccagcccgatccagtaaaactgttttatggcttttacttcatcaaacagcttcatacacctgtttcctatttattgaattgattgattactatttattgaattattagttcaattcatacttagcatttcttatgtgctaagtactgttagacagtgggtatataatggtcatcataaacattaaaacgatactttataatcaaattgaaaggaatgaggattaaaaacctctctaattatatgtattccagtaaggactgttgtgagaagaatgttttgaggaaagatgccatgactaggagatttttaatctagaatgagttaccagccaaagagtcgcttacatttcacagtatctagaaaatatgaaccataaattttctcatttatttttaaaactaaagagggacagttttcaagtttttattgtattcttgtgaaagatataaaaaccaattattgttttttatatgaaaattatgtgggaagttttaaaaaggactatttttgttttatcatacatatttaacaatctatctttttgatgatatatatcaggtaaaatgctattttctcagaaaataagatataggaagacccacaggctagcacttttttaataatttctacaagatgtaattcaagctggggccagtgtagagattctgccaagcctgtctcttgtaacaaggaaaggaatggaaatataagcaagacatggttttccattacttaaagttcatatgtctatagtttttggatgtatatgtgccatatatgttatgcctttcaataaaccaacccactttcacctggcactttctaagggtattttgaacatggatggaacatggatgggatttcaaagagctcaaatcacccggtatcaataacaattggtttatgaaatgaaaaactagagaccattgcaaacagaagcaaatgcctgacctaatgattgatgtgtctagggaaataaaacaaccaaaactgtagtctcccttttttataatttgtactgaaagtcctgaaaagtgaggtatactatctctccaagagcttgtgataatctccagtcctcaggcaagtgaacaccaccctgcaaaatgataggtgagggaagtcaccactggtgtgattttcagaaataataaaaaagtacaaaaaaatctcaatttattcctatgaaaagtagaaccatagaattatgagcacacccctataacagaacctgaaaatggcttcattccctttcctggggcaccctagggcttgtgaagtgtgcttttcattgatatgatctacatgttatttctagactgaagataacttagcaaatcatgttgttttcacatccctcagcaattccagaattcctctacttcattgtgaagtaaaattggaatttattatgaaagagcttcaaagtaaatttaaacactggcaagagatgatcaagtaaaagacaattgtacctgccattgaatgggcacaagcttctcaccagagtcgccctaagattgtagttcataaacataatgaacactagtcaatattttgctattaagctgaatcttaagacaaattttcattaataaaaaatactgtaaacatgatcttgaacttgggcctttgataatctttttttttttttttaaatcttttcccagcccatttgttctcctccttgttctggtctgccctctggctgttcctcttccccctccccacatctccaggtctccaagaagatggttctgccccctctcctccaccaccagacttccctgcttccttaggcttcaagtctttccagggataggagcttcttctctcactgatgccagagcacgcagccctctgctatatatgtgtccgagacttcatatcagctggtgtatgctgtctagttggtggctaagtatctgagtgatctcaggggtccaggttagttgaaactgctcatctccctatggggttgccctcctcctcagcttcttcctgcttttctctaactcaatcacaggggtccccagcttctgtccattggttgggtgtaagtatctgcatttagagtccagagctccggggtactggttagttcataatgttgttccacctatagggttgcagatccctttagctccttgggtactttctctagctcctccattgggagccctgtgatccatccaatagctgactgtgagcatccacttctgtgtttgctaggccccagcatagtctcacatgagacagctatatctgggtcctttcagcaaaatcttgctagtgtatgcaatggtgtcagcgtttggaagctgattatggggtggatccctggatatggcagtctctagatggtccatcctttcatcacagctccaaactttgtctctgtaattccttccatgggtgttttgttcccaattctaagaaggggcacagtgtccacactttggtcttcattcttcttgagtttcatgcgtttagcaaattgtatcttatatcttgggtatcctaagttttgggctaatatccacttatcagtgagtacatattgtgtgagttcctttgtgattgtgttacctcactcaggatgatgccctccaggtccatccatttggctaggaatttcatgaattcattctttttaatagctgagtagtactccattgtgtaaatgtaccacattttctgtatccattcctctgttgaggggcatctgggttctttccagcttctggctattataaataaggttgctatgaacatagtggagcatgtgtccttcttacccgttgggacatcttctggatatatgcccaggagaggtattgctggatcctccggtagtactatgtccaattttctaaggaacctccagactgatttccagagtggttgtacaagcttgcaatcccaccaacgatggaggagtgttcctctttgtccatatccttgccagcatctgctgtcacatgaatttttgatcttagccattctgactggtgtgaggtggaatcttagggttgttttgatttgcatttccctgatgattaaggatgttgaacattttttcaggtgcttctctgccattcggtattcctcaggtgagaattctttgttcagttctgagccccattttttaatggggttatttgattttctggagtccacctacttgagttcttcatatatattggatattagtcccctatctgatttaggataggtaaagatcctttcccaatctgttggtggtctttttgtcttattgacagtgtcttttgccttgcagaagctttacagtttcatgaggtcccatttgtcaattctcgatcttacagcacaagccattgctgttctattcaggagtttttcccctgtgcccatatcttcaaggcttttccccactttctcctctataagtttcagtgtctctggttttatttgaagttccttgatccacttagatttgaccttagtacaaggagataggaatggatcaattcgcattcttctacatgataactgccagttgtgccagcaccatttgttgaaaatgctgtctttcttccactggatggttttagctcccttgtcgaagatcaagtgaccataggtgtgtgggttcatttctgggtcttcgattctattccattggtctacttgtctgtcactataccagtaccatgcagtttttatcacaattgctctgtagtacagctttaggtcaggcatggttaatccaccagagggtcttttatccttgagaagagtttttgctatcctaggtttttttgttattccagatgaatttgcagattgctctttctaattcgttgaagaattgagttggaattttgatggggattgcattgaatctgtagattgcttttggtaagatagccatttttacaatgttgatcctgccaatccatgagctaaccagtaccccggagctcttgtctgtagctgcatatgtatcaaaagatggcctagtcagccatcactggaaagagaggcccattggacgcacaaactttatatgacccagtacaggggaacgccagggccaaaaaaaaaaaaaaaaaatgggaatgggtgggtaggaaagtggggggggtttatgggggacttttgggatagcattagaaatgtaattgagaaaaatatgtaatataaaatattttttaaaaattaaaaaaaaacaatctgaggtttagtgggatggaactctctgaaaaaaaaaaaaaaaagatatgcactcactaataagtggatattagcccagaagcttgggattctcaagattcaattcacaaaccacatgaaactcaagaagaaggatgaccaaagtgtggatactttggtccttcttagaagggggaacaaaatacccatggaaggagttacagagacaaagtgtggaacagagactgagggaatgaccatccagagtctgccccacctggagatccatcccatatacaatcaccaaactcagactctattgtggatgccaacatgtgcttgctgacaggagcctgttaaggctgtttcctgagaggctctgtcagtgcctgacaaatacagaattggatgctcacagtcatccattggactgagcacagggtccacaatgaaggatctagagaaaggacccaaggagctgaaggggtttgcagccccatcaggggaacaacaatatgaaccaaccagtacccccagagctcccagggactaaagcaccaaccaaagagtacacatggagggaaccttggctccagctgcatatgtatcagaggatggccttatcagacatcaatgggagaagaggccattggtcctgtgaaggctcaatgccccagtgtaggggaattccaggaccaggaagtgggagtatttcacttagcgaggagggagaggggaggagtaaggggttttttgaggggaaactaggaaaggggataacatctgaagtgtaaataatggaaatgtctaataaaagaagtaaaatgattttttaaaaaaagtatctgcgtttaactctttcacctgcttgctgagcctcttggagggcagccacactaggctcttgtctattgactttcatgcaatggaactcctgggtggccttcagactgtggtgtcttcagaggagctggtgatctgcctgggcagaaggtgcaggctggaaggataatctttttttttttttccattttttattaggtatttaactcatttacatttccaatgctannnnnnnnnnnnnnnnnnnnnnnnnnnnnnnnnnnnnnnnnnnnnnnnnnnnnnnnnnnnnnnnnnnnnnnnnnnnnnnnnnnnnnnnnnnnnnnnnnnnnnnnnnnnnnnnnnnnnnnnnnnnnnnnnnnnnnnnnnnnnnnnnnnnnnnnnnnnnnnnnnnnnnnnnnnnnnnnnnnnnnnnnnnnnnnnnnnnnnnnnnnnnnnnnnnnnnnnnnnnnnnnnnnnnnnnnnnnnnnnnnnnnnnnnnnnnnnnnnnnnnnnnnnnnnnnnnnnnnnnnnnnnnnnnnnnnnnnnnnnnnnnnnnnnnnnnnnnnnnnnnnnnnnnnnnnnnnnnnnnnnnnnnnnnnnnnnnnnnnnnnnnnnnnnnnnnnnnnnnnnnnnnnnnnnnnnnnnnnnnnnnnnnnnnnnnnnnnnnnnnnnnnnnnnnnnnnnnnnnnnnnnnnnnnnnnnnnnnnnnnnnnnnnnnnnnnnnnnnnnnnnnnnnnnnnnnnnnnnnnnnnnnnnnnnnnnnnnnnnnnnnnnnnnnnnnnnnnnnnnnnnnnnnnnnnnnnnnnnnnnnnnnnnnnnnnnnnnnnnnnnnnnnnnnnnnnnnnnnnnnnnnnnnnnnnnnnnnnnnnnnnnnnnnnnnnnnnnnnnnnnnnnnnnnnnnnnnnnnnnnnnnnnnnnnnnnnnnnnnnnnnnnnnnnnnnnnnnnnnnnnnnnnnnnnnnnnnnnnnnnnnnnnnnnnnnnnnnnnnnnnnnnnnnnnnnnnnnnnnnnnnnnnnnnnnnnnnnnnnnnnnnnnnnnnnnnnnnnnnnnnnnnnnnnnnnnnnnnnnnnnnnnnnnnnnnnnnnnnnnnnnnnnnnnnnnnnnnnnnnnnnnnnnnnnnnnnnnnnnnnnnnnnnnnnnnnnnnnnnnnnnnnnnnnnnnnnnnnnnnnnnnnnnnnnnnnnnnnnnnnnnnnnnnnnnnnnnnnnnnnnnnnnnnnnnnnnnnnnnnnnnnnnnnnnnnnnnnnnnnnnnnnnnnnnnnnnnnnnnnnnnnnnnnnnnnnnnnnnnnnnnnnnnnnnnnnnnnnnnnnnnnnnnnnnnnnnnnnnnnnnnnnnnnnnnnnnnnnnnnnnnnnnnnnnnnnnnnnnnnnnnnnnnnnnnnnnnnnnnnnnnnnnnnnnnnnnnnnnnnnnnnnnnnnnnnnnnnnnnnnnnnnnnnnnnnnnnnnnnnnnnnnnnnnnnnnnnnnnnnnnnnnnnnnnnnnnnnnnnnnnnnnnnnnnnnnnnnnnnnnnnnnnnnnnnnnnnnnnnnnnnnnnnnnnnnnnnnnnnnnnnnnnnnnnnnnnnnnnnnnnnnnnnnnnnnnnnnnnnnnnnnnnnnnnnnnnnnnnnnnnnnnnnnnnnnnnnnnnnnnnnnnnnnnnnnnnnnnnnnnnnnnnnnnnnnnnnnnnnnnnnnnnnnnnnnnnnnnnnnnnnnnnnnnnnnnnnnnnnnnnnnnnnnnnnnnnnnnnnnnnnnnnnnnnnnnnnnnnnnnnnnnnnnnnnnnnnnnnnnnnnnnnnnnnnnnnnnnnnnnnnnnnnnnnnnnnnnnnnnnnnnnnnnnnnnnnnnnnnnnnnnnnnnnnnnnnnnnnnnnnnnnnnnnnnnnnnnnnnnnnnnnnnnnnnnnnnnnnnnnnnnnnnnnnnnnnnnnnnnnnnnnnnnnnnnnnnnnnnnnnnnnnnnnnnnnnnnnnnnnnnnnnnnnnnnnnnnnnnnnnnnnnnnnnnnnnnnnnnnnnnnnnnnnnnnnnnnnnnnnnnnnnnnnnnnnnnnnnnnnnnnnnnnnnnnnnnnnnnnnnnnnnnnnnnnnnnnnnnnnnnnnnnnnnnnnnnnnnnnnnnnnnnnnnnnnnnnnnnnnnnnnnnnnnnnnnnnnnnnnnnnnnnnnnnnnnnnnnnnnnnnnnnnnnnnnnnnnnnnnnnnnnnnnnnnnnnnnnnnnnnnnnnnnnnnnnnnnnnnnnnnnnnnnnnnnnnnnnnnnnnnnnnnnnnnnnnnnnnnnnnnnnnnnnnnnnnnnnnnnnnnnnnnnnnnnnnnnnnnnnnnnnnnnnnnnnnnnnnnnnnnnnnnnnnnnnnnnnnnnnnnnnnnnnnnnnnnnnnnnnnnnnnnnnnnnnnnnnnnnnnnnnnnnnnnnnnnnnnnnnnnnnnnnnnnnnnnnnnnnnnnnnnnnnnnnnnnnnnnnnnnnnnnnnnnnnnnnnnnnnnnnnnnnnnnnnnnnnnnnnnnnnnnnnnnnnnnnnnnnnnnnnnnnnnnnnnnnnnnnnnnnnnnnnnnnnnnnnnnnnnnnnnnnnnnnnnnnnnnnnnnnnnnnnnnnnnnnnnnnnnnnnnnnnnnnnnnnnnnnnnnnnnnnnnnnnnnnnnnnnnnnnnnnnnnnnnnnnnnnnnnnnnnnnnnnnnnnnnnnnnnnnnnnnnnnnnnnnnnnnnnnnnnnnnnnnnnnnnnnnnnnnnnnnnnnnnnnnnnnnnnnnnnnnnnnnnnnnnnnnnnnnnnnnnnnnnnnnnnnnnnnnnnnnnnnnnnnnnnnnnnnnnnnnnnnnnnnnnnnnnnnnnnnnnnnnnnnnnnnnnnnnnnnnnnnnnnnnnnnnnnnnnnnnnnnnnnnnnnnnnnnnnnnnnnnnnnnnnnnnnnnnnnnnnnnnnnnnnnnnnnnnnnnnnnnnnnnnnnnnnnnnnnnnnnnnnnnnnnnnnnnnnnnnnnnnnnnnnnnnnnnnnnnnnnnnnnnnnnnnnnnnnnnnnnnnnnnnnnnnnnnnnnnnnnnnnnnnnnnnnnnnnnnnnnnnnnnnnnnnnnnnnnnnnnnnnnnnnnnnnnnnnnnnnnnnnnnnnnnnnnnnnnnnnnnnnnnnnnnnnnnnnnnnnnnnnnnnnnnnnnnnnnnnnnnnnnnnnnnnnnnnnnnnnnnnnnnnnnnnnnnnnnnnnnnnnnnnnnnnnnnnnnnnnnnnnnnnnnnnnnnnnnnnnnnnnnnnnnnnnnnnnnnnnnnnnnnnnnnnnnnnnnnnnnnnnnnnnnnnnnnnnnnnnnnnnnnnnnnnnnnnnnnnnnnnnnnnnnnnnnnnnnnnnnnnnnnnnnnnnnnnnnnnnnnnnnnnnnnnnnnnnnnnnnnnnnnnnnnnnnnnnnnnnnnnnnnnnnnnnnnnnnnnnnnnnnnnnnnnnnnnnnnnnnnnnnnnnnnnnnnnnnnnnnnnnnnnnnnnnnnnnnnnnnnnnnnnnnnnnnnnnnnnnnnnnnnnnnnnnnnnnnnnnnnnnnnnnnnnnnnnnnnnnnnnnnnnnnnnnnnnnnnnnnnnnnnnnnnnnnnnnnnnnnnnnnnnnnnnnnnnnnnnnnnnnnnnnnnnnnnnnnnnnnnnnnnnnnnnnnnnnnnnnnnnnnnnnnnnnnnnnnnnnnnnnnnnnnnnnnnnnnnnnnnnnnnnnnnnnnnnnnnnnnnnnnnnnnnnnnnnnnnnnnnnnnnnnnnnnnnnnnnnnnnnnnnnnnnnnnnnnnnnnnnnnnnnnnnnnnnnnnnnnnnnnnnnnnnnnnnnnnnnnnnnnnnnnnnnnnnnnnnnnnnnnnnnnnnnnnnnnnnnnnnnnnnnnnnnnnnnnnnnnnnnnnnnnnnnnnnnnnnnnnnnnnnnnnnnnnnnnnnnnnnnnnnnnnnnnnnnnnnnnnnnnnnnnnnnnnnnnnnnnnnnnnnnnnnnnnnnnnnnnnnnnnnnnnnnnnnnnnnnnnnnnnnnnnnnnnnnnnnnnnnnnnnnnnnnnnnnnnnnnnnnnnnnnnnnnnnnnnnnnnnnnnnnnnnnnnnnnnnnnnnnnnnnnnnnnnnnnnnnnnnnnnnnnnnnnnnnnnnnnnnnnnnnnnnnnnnnnnnnnnnnnnnnnnnnnnnnnnnnnnnnnnnnnnnnnnnnnnnnnnnnnnnnnnnnnnnnnnnnnnnnnnnnnnnnnnnnnnnnnnnnnnnnnnnnnnnnnnnnnnnnnnnnnnnnnnnnnnnnnnnnnnnnnnnnnnnnnnnnnnnnnnnnnnnnnnnnnnnnnnnnnnnnnnnnnnnnnnnnnnnnnnnnnnnnnnnnnnnnnnnnntagggtcccgtggggagtccccgtgtgggcccttgcgggtgttgggcaagactctgctggcaaggtagcccggggctcgagtctcgagtcgagcggaagggacttgtgccccagatcaggcccgggtagcctgcttccctatgtaccgcagtctcaagttccgcgcgattggattggggcaggcactgtgatccactcaccagaggtcttagggtcccgtggggagtcccgtgtggacccttgcgggtgttgggcaagactctgctggcaaggtagcccggggctcgagtctcgagtcgagcggaagggcaaggataatcttcttaagacaatagttttacatgttctaaaagaaattttgtagttaaaattttgatgtcaaggcctttatactattctaagtataaatttaaaggcttgaaaccaaataaatccttcaatatcctttgaaacattatcatgggaatttaaaaaatctgaactttactattactttagggaaagtgtttttcctcaaatatgtgaccatattttatttaagttaatgctaaaagcacttctatcccatgtgaataagtcttttcttcatttatatagtggatatccttgtatattgtaatgggtatagttgaaaactgttcagttatattaatgtgttcattgaaagtaaactgttcttgcaattagtaatttataaacacctccatggaattatctgatgatatttagctacagtgagtcaattattatttttacatatccaaataactgagtttaaagtcaattcttatataagggcaaaaggaagaagtcacaaattaaagattatatatctgtagcatgctttaatttctaattacttggctaattaatttatagattataataatcatggtggcttaaagcaaatacatttcctcaatagtttaaatctttagcccacctatctttcatctttgaataaagacagaaccctgtcctgctgtgcacctggtcagttgtgcaatgctgaccagtgagcagctgctaacaatgaggctattgtgtttatataacacagtgcaggatctgatggttagtctcttgataatgttgaaacactagggaattttctcttgccaagatacaggcttcatggaaagtactttgtctgttttgaaccacattctaacagatctctgtcagttggtagccttgcattctataagatctcattagcctctcaagttactctgagtaggttcaggatccaagacctggccctttggggtggcaatagatgtggtgggtaggaactgttttttgttgacatgttttacctccttaacaaaagtctgaatcatttttcttcccattgatgtgggtgtgtccttgtatgtgcagtcaagagaggcatttgttgagtgatcttcatgcaaacatcttggagtgcttttcaaaagaatttgaaaaattaaaccaaacaggatatgaaactgtgctgccaagcaagtaagtctttaggcatgatttaaatttagttaatgacataaagagtgaaatctgtgaaaggaagcaacttctttggatcagaaaaaaatactcatattttgtctacattttcatttgaatagctcaaaaaatattctctcagaagtcacttggaaaactttgggctaagtgaactccaaggacaagtgtttcagggggaaagacaagataatagttcccatatgcataggaatatacagactgcaaaacatttcccaatcatgattttttttgatgtcacaatatcctaccgaaatagctaaaaaaaaaaacaaaaaaagggactatttccattttacagatgaataaactgatggtaagtaaattaggagattaaagtgaggtctctgagtaaatggtattctgatctgcgtttaactctgtacttcctgtatagcaccaggacttcccatggtagcaaatcactttgactcaatatttctctctctgtttctgggataatatgaagatcccagcctcccaaaacacactggagttctgctacatctcaggaggaaaattacaaagccagggtcttctctggtaactgcattgtcaataacaatttcatgactcaatcctttcacaacatttagaatggccttgatggtcttcctttcaggtcaccgctagtgttccctactatctcctctgtgaaatgcaaattgagttatcagatcctcaatttctgtgattaaagtagcttcacccagtaagagaaaaaaatatgaggatttctttttttttttcaaaaacaatttttaatagatatttttttcattacatttcaaatgctatccggaaagtcctctatgccctcccctcaccactgctccccaacccacccactcccgcttcctggccctggcattcccctgtattggagcatataatctttgcaagaccaaggacctctcctccaattgatggcctactaggctatcctctgctacaaatgcatctagagacacaagctctgggggtactggttagttcatattgttgttcctcctatagggttacagacccctttagctccttcattgggggccctgtgttacatccaatagatgactgtgagcatccacttatgtatttgccaggcactggcatatcctcacaagagacagctatatcagggtcttgtcagcaaaatcttactggcatatgtaatagtatctgggtctggtggttgtttatgggatggatccccaggtggcacagtctctggatggtcctttcttccatctcagctctgaactttgtctctttaactccttccatgggtattttgttccccattctaaggaggaactaagtatccacactttggtcttccttcttcttgaatttcatgtgttttgtatcttgtatctcgggtattctaagtttctgggctaatatccacttatcagtgagtacatatcatgtgtgttcttttgtgatatggttacctcactcaggatgatatcctccagatccatccatttgcctaagaatttcataaattcgttgttttcaatagctgagtagtactccattgtgtacaacattttctatatccattcctctgttgggggacatctgggttctttccagcttctggctattataaatatggctgctatgaacatagtagagcatgtgtccttattaccagttggaacatcttctagatatatgcccaggagaggtattgctggatcttccagtagtactatgcccaattttctgaggaaccaccagactgatttccagactggttgtgccagcttgcaatcccaccagcaatggaggagtgttcctctttttccacatcctcaccagtatctgctgtcacctgaagttttgatcttagctattctgactggtatgaggtggaatgccagggttgtcttgatttgcatttccctgatgattaaagatgttgaacatttttttcaggtgcttctcagccattcagtattcctcagttgagaattctttgtttagctctgtaccccatttttaatggggttatttgattttctggagtctaccttcttgagttctttgtgtatattcccctattggatttaggattggtaaagatcctttcccaatctgttggtggcctttttgtcctattgacattgtcttttgccttactgaagctttgcagttttatgaggtcccatttgtcgattctcaatcttacagcacaagccattgctgttctgttcaggagttttccccctctgaccatatctttgaggctttttccccactttctcctttataagttgtagtgtctctggttttatgtggagttccttgatccacttagactttagctttgtacaaggagataagaatggatcaatttacattcttctacgtgataactgctagttgagtcagcaccatttgttgaaaatgctgtcttttttccattggatgattttagctcctttgtcaaaaatcaagtgaccatagatgtgtgggttcatttctgggtcttcagttctattccattgatctacctgtctgttgctgtaccagtaccatgcagtttttttcacaattgctctgtagtacagcttgaggtcaggcatggtgattccaccagaggttcttttattgttgagaatagtttttgctatcctaagttttttgttattccagatgaatttgcaaattgcccttcctaactctgtgaagaattgagttggaattttgatggggattgcactgaatctgtagattgcttttggcaagatagcattttgactatattaatcctgccaatccatgagcatgggagatctttccatcttctgagatcttggatttttttaagagacttgaagttcttatcatacagatctttcacttccttagtcacaccaagatattttatattatttttgactattttgaagggtgttgtttccctaatttctttctcagtctgtttatcatttgtatagagaaaggccattgatttgtttgagttaattttatatccagctactgcactgaagctgtttatcaggtttaagagttctctggtggaatttattaggttcacttttatatactatcatatcatctgcaaatagtgatattttgacttcttcctttccaatttgcctcctcttgatctcctcttgttgcctaaatgctctgaaatatgtggaatttgtaataagctttcttcccattaaccatggtgttagtcagctgtacattgctatgaaaaatatggttatttatttcttgaatgaagaagatatattttagctcaaagttttagtggctttagtccatgtttgactggtccatgctttgaatcttccaggagaaagaatatcataataggaatgagtgcatggtagaacagagctgtttctgtcttgttagtgagaattagagagagaaagagatagaggcctcaagatcttgctcaagcagatgggcccactcaccaaccttcttccactattcctccacttaaggattcccaaccatgccgaggacgaacgaaacctctaacacatagaacttcagaggatatcacagatctaaatggtagcactaaattggaccaagtgcaagtgtccttgaatgtctaaagattttgtgaactccacttcatgcagtgcaaaagggcatagtgtcagagctgtggattacttgtgttgattccaggcatgaaatgtatagtattaactttgtaagatacattcagatgtgcctgctgtgttgatgttgtcttgccttttctgctaaaaacacatttcacttctcatgtgagattggactttaacatgttgactttctttttgataatgttattggattcagaaaaatctgagaagagcagttttgtgattcttgaattgttggctaaactcacagggtcgaaaacaggaataaacaattgaaaccaagtctttgtaagtagcttctggagcagatcactcaagctagaaagaagcccaagccaggaaatggataaatggaaggacactaccagggcaggaagtgtcaggcacaaagccaataaacataagaatattaattttttaccctatattcaaatgttttttgcagattttacatttatgcttgattgaaaagtattaacatcaatacttctgctatcttgcattacccaatatccacaacctatccaaaagatttatatgacttccacatgtcatttaagcattcaaagaggaagataaatcactgtatgtggaaatatcaaggataagagatagccaaagcagtgtccccacactggctgccttccttattctgacctcctgtatgggcgaacattctcttgtccttcaatctctgtggtgttgagttatttctggctctttgtcataacctttggatactgtcttcctctttgaaccagtgtttatcccaacatcacttggtcactattttttcatttcccccagcttggcttagttttactatacccctatgtctatatttgctttatgtctacctttgacagtgtaattttaatttaatttccaggttttctaatctttagcacgtgacggactgtctatctcaagttatcctatgttacatgcctctataaaatcctgttattgatcactttgctccttggtttccttttctgtttgcttgcttgttgtttttcaagacacagtttctctgtgtggccctagctgtcctggaactcgctctgtagaggctgaccttgaacttacttgatctgcctcccacgcgctggaattaaaggtgtgtatcaccactgctcagttctcggtttctcaatagcatgtggtagatgctcaagaaggcacagaaatctccgtaaggtcactctatgcctactcagctgcatccttacaatactactgttcaaatatgtgcaaactttcaatgatctccaatttcaacagctaaaccagagtaaaaattgctttttctaatttctgttctaattaaccagggattcactagaggaaacaatatcatcactcacacattgtccttagcagatgtcatctttaggatagattctcagccaatgtctgctaaccatttaatatggaccataaaactgtgagaacagaaaagctaaatttagaccttatcatttaatcagtttctaaatggaatgtgtgcatatgctgcatgacatgatgtgttgccctattgaaatttctctgttaattataactgagatacttggtcttcattgcctaccacagttgccactaaccacatagttatagagcacttgaaatgtgtctaatatgactgaggggttttgctttaactttgtttaaccataaatagagtttgaaaagccttttgtgggtagtggattaaagtgaatgggaagattaaaatgtatctataaatatggatgatgagttagggagtcctcatggaggatgatagacttttgtcataaagaaggatatgttacagagggattttcttacagagagttgacacactaaatgtttattcaccttggttttgttttccattggcatagcaaacagggcggaggtgggaggagaggagatattttaattaaatctaaatgattaaatgttatatgacttattctattttccttttatttgtttaaatgaaaaataattactatatgagaggatacaatatttgaaaggtggctttaagattcctcaatatctcttgtgaggctataccggggcctagcaaacacagaagtggatgctcacagtcagctattggatggaacacagggcccccaatggaggaaagtacccaaggagctaaaggggtctgcaacaatataggtggaacaacaacatgaactaaccagtaccccccagagctcgtgcctctggctgcttatgtatcagaaaatggcctagtcgtccattattggaaagagaagtccattggtcttgcaaactttatatgcctcagtacaatgggaatgccagggccaagaagcgggagtgggtgggtaggggagtgggggagagggtatgggggacttttgggatatcattggaaatgtaaatgaagaaaatacctaattaaannnnnnnnnnnnnnnnnnnnnacctaattaaaattttttttaaaaagattcctcaatatctaaaggaattttcattttctacagtggctgtcttttcagcatattttgtttttcttctttttatgccaagaactttgttgtatggacctagtcatctaaagtcttgtctggtcttgctgtcactaacttgactgttcatacagccatgggtaacacaacttttaggtaggacaggacttcaaactcttatctggcctagtcttatttttaagcaaattaataagtgttagcaatcacagttgtaaaggttagagtttcctgcttaaatctgtttatttaaatagggaactataagcaagattaatcaaggattatggttttagcattttacttggttctcagcttcaacatttctccagttcaagatttattaatatcacatgtaataatactccaataactttatttaatcttggattaaatcttataagtaagtgggaaaattaggaaaacttgtatgcttaaatgaaatgtatttattaacatttaatttgatgcgatgaatgtgaaaacactttaaaagatgtcattgaacaagtgtgctattttcctctgattttatctttcattcatctacttgtcattctctatattcgcaggatctggcattactgaaaaaaaaatggtatctgatcactttgttggctagaaaatagtattggtttgtgcaattaaatatacaaattgttttttgggatctaatttaaaaatctgattcaattgcgtatgtgtgtggtgtgttctgaatatgaatgtaaagaacatacatgtgcatgttagtgtgtgtctgtatatgtttgcttgtatgtgggactcagaaaatggcattggctgtctttctcaatctctcctctactattttaatctgatcagtgagtttcaacaaccctcgggtccttaccctttcccctttcccagcaataagatgtatactacctgacccaactattacaaaaattataattacatctttccttcctctcctccctccatcctctatatacccttattcttttcaaatatatgaccacaatttctttaattattgttttatatatatatatatatatatccatataaatggaatatatgtatacatatgtatgtaattttacaatggatgttatttgtctttatagctccatgatatttctcttatccaggctagagtgtgaactactggtattgtcattgttcaggtcttgtttatgcatccatattgatattttatggttacagcttccttatcatgtctccaatcttataggagaattcctggttctattgttcttacaatatttcattccactccacaaatttgtcctttaatccaggtgtagttgtgttgatgtatcaattgaggctgggcatcacataatcagttgttctctgtgctttgatcagttttgtatttccataacggtctccatctgttgcatagagaagcttacttgatgagggatgagacctatctttgtctggatataaggatagatatttaggagataggtatgaattatattgatttaggaaggttgtattataagatctactgcttactaaccatgggtagttggctaggtgtacagtactatgcatggattccttattattgagtgaactttaaattcataagacggctattagttacagcattatataagtgctattatcggaggttcagggatatttctcagagctagcctttgtgtttcatagtcagcatagtttggctaggattagtgattgctattctctcgtggcagcttgcatagctctgaaatctcgtctccagggtgaagacttacagatcagttacagctcagtttctccaagtcctctgtctgaagtgtatatatagtgttttcttaccttcagtttttggggttgggtaaccaagggcaatagcaatagcttttataatttgggagttcttgggctctctttatgagcaactcaaaatgaggttttccatacctccttaatgttttttgtttgtttgtttgtttgtttgtttgtgggttagtatttggctcctggggacaggtcagggagaaagttatcacctccatggcagcatgggggaacttcagaatacacacacacacacacacacacacacacacacacacacacacacagagagagagagagagagagagagagagagagagagagagagagactaagttacattggtgctgaggatctaaactcacatcctcatgtttgcacatttaatttgcagactgctccatctattttctgaaatagtttttctgaatggaaagaaacccaatgattaatgttattgtgttcattaatcttaaataattatttaaatatatgtgtatatttgtatatatgaacccaaggagactctcttttccatatgcaccaaattttatttttcttgtaatttcagtgattatcttaatgatctctgtgtttctatagtgggatgcctaagacttgataaagtatgaaggtcacatgtttgttcttttacagtcccctagtttagaaaatccaaaatcaaagatttgtcagattattgctgggtttctctggttctgacttggaccatcgaaagagtgcatgtctgcatgtggttgaagcaagagcctctttaatccccacagaaatgtttagttatgctctcatgatctgagcaattccctgtaaggcctattttatgattaagggataaatttccaatttatatgctttgtatgacacattctgaccatactagctgcatacagattatggaactagatataagatgagagagtttactaattcttgattgtatcacatcaatattaatatctccataatataatttagacagtaaaagcttaaaccaaagaaagaagtggtatataacattttaaaaaatatatcccaatgttctcaaagcatttatgataattctttggactttttctttcatttatatctatctagaaaggtgtgtagagaggctattgttgtttttcatgtctagattgttggaacagtacataaagtgcaaatatctcttgctcacatctctctctctttctctctctctctttctctctctttctttctctctctttctctctctctctctctctctctctctctctctctctctctctctctctccctctctctctcaacatttaaacacatttctgtcagtagggcccataacagctaagggaataacctgcttggaattcatgtcataaataagatcgatctaggtaagtgtctctgaggtaaccatagtccttggctaggctgagtggctggtaggacaaagagacaatgacttttaaggatatatccaaagaagaagacagatggccaatggattgttaagaatccagatccagtgaggcagaaatagcctaggagtacagactggagaaagctggagataacatcaccgtctatttctcttctctgctatcccaagctcatgcattgcatatttttattccctatgataaaggtaggtaaagaaactctttatctcatggctattttttcctgtctatatatctgtggtggctattcttggttgtcaacttgactacatctggaatgaactgcaattcagaaatggaaggcatacttttgagagattttttgcttggattgaagtagttgaatctaattctaatcctgatctttgaggtagaaagacacaggtctttgatcttgagatgggagacacacctttaatctgggttatgccttctgtcagaagcctatataaacacatagaaggaagcttttgctctttcctggtttgctcttgccttgttagcgagtccatcccttcatttgcattagaatctatttctttgggattccatcatctattcaataccacctgagacatctagatatgtggagtgagcaacttttgtgtttttgaactttctattcataacctgcccctgttgatttaagtggaccatagcaggtaagtgattctaatatgtatgtatgcaatatatatatatatatatatatatatatatatatatatatttagagagagagagagagagagagagagagagagagagagagaccgagagagacggagacagagacagagacagagaggagagagagtgatatttattccataatatcactccatctgtggagctgtgaattttgtggattttgtttatactgttctgtggtgtgccgggcagttccgacccgttaccaccatgagcagagctgagagtggagtatgactgccgaatcttgaaaaacactgcataaaatgctaggagtgtttagacgacaagttgaagttgatagatctgacaacactggagtggaatgaaagccctcacattgcttcttggagaggagcacggaaaaatagactttcaccaattccctgttggcatctagtttcctgggctactggatacaccctactcctttctgtttcctctttttcattaattttgccacaagaagaagaatttacttttttttttttttggataaaaaaattgtcagagctaagcccccactgtctctttaaaatcacttaggtatcagaactcattaaatatctaatgtgataacaagaatatggagatggtctatggtaacaaaggttacaatgtaatggattacacccatgggaggataagatttagatttcatactggtgtctaagagcctaattttgaatttagtagcataagcaattaccatcatgaagagcagctgtggggacctttgttccctctacagctgaaggaaaatggtttgtctggtagactaaaaaacattttaaaatagtagggaaatttggacatcttagagaacaaataatcacatccccatgtagtgtgaaacttttttattcagaacatggctgacatgtttataagataagtttcttttcaaagcagagaaccacacagatgtctcatctggcggggggatttatgaactatgtggcttactttattgttcttgttaatagtaaaacaaactgttcaatttagaaattatttcttatcctcttcatagcttcttgcacattttatttgaatctttgaaaaagtcctttgtattttaaaagttgattcactgattccaataaaaatagttaaaaagaagaactggggatatactatgtccatgaaaaccagtggtttttctgaaattaaaagtaccgaagctccttctcagtactgaacatatagaaaactttgccagggctagacattgatgttgcgatataaattttgttatctggacacttttcttttatttgaatgtataccaaatattctaagttggataactaggaagccaattctaaagtcatacaagctatcaaagcaaacataactcttcaactcactgatatgtgagtcttaagtgacagatttgaatgatctatgctaatacttgtacatgtatttcactatacagtggtcactctagatgtaggggtgattaggaattctctttgtctactattgagttattagtttctctacttgttccctgcatttccttttgcatatcttaacagtaacctccatttgcatctcacataccagtgtacttattggattaatgaagtttggggaggttttgtatcatgttcttccatatttttattaacatgtctgctatttagaagcagatgactctctcgtgagtagcaaatggcacatgatttatgaggtcaggagtcatggattttatccttcatgtctgaattacccatgtaaccaagtgcttgctttcatggtggctaaaagagttatagatgaaattatgtatctttctaggtagaattacttaacttttggggcctatgggactccttggagtcacataacaggtaggcaggttaatcattaatctaggggacctagatatcataattcttgattcttttaattaatcttttctcccatgctgcttccttcaataaaaatgcttaacctaaaagagagagagagagagagagagagagagagaaagaaaagagaaacaaacaacaaaaatcatctgatttctaattctagaatatattccccaatatacttcattaaaaaagggaactggtctgtatcttcttaaatggtttgggggatataatgaatataatgaatataatgaatataatgaatataatgaatggtatggttgtgaacatttaggttcaggtaagatctccctcccctatactccatacagactcttacaacatctgtaaacatgtgtattttattcacttgaataaaaaaaaaaaaaaaaaaaacaaagaaacatgtttaagaaacatccaattcaactgactgtagcaagtgtaatgttcttttcaagtttggggtacaggcaggttcatgtggtagtcatcagtgctgtttactaaatatttccagctcttgaatcctggcaacaatattttgattctacttctcagctttcttactgtagaatgggactatgtgactagatctggccaaactgctgggaacagggagtctctgtcacctccagcttatgccatttgacccaagactgctctcatcctctttggcgaggtaactggtaaattcctgagatgctggcttctctatttcccttcattcttgaatggtgaaaaggagcagagtcctttactgatattttcacgaaagagaagtaaacctttcttgttttaagccactaagatttgggttgtcattttgattgtataatttaatgctttttgttactgaagcaaagtcaagcctattcttactcatgcaggttacattattcttattattttagataatcctggcatccttcagatgttataatttgccttctatatcaatttttcaaaagttacagtatttgtaattacaattactcgtttttatttgtatatgtgtatgggggcaattgctatggtgtacatgtggcaatcaaaagacagattttgggaattggttttctcttcccatcaagtgggacttgtgggtcaaactcaggttatctgtcttggaggctgtagaggaattataatccagcaacatggctgctctggcaagggatcacatccaaagacctggtccatgtgatccaggtggaatgcagacatgcctggactacaatatgatctggctggaatacaggcacaacattagtacactcttttttattattagatattttctttatttacatttcaaatgttatcccctttcctggtttcccctccgaaaactcctgtcccctccccctctacctgctcaccaacccacccactcccacttcctagtcctggcattcccctgtactggggcatagagccttcacaggaagggcctctcctcccactgctgactgactaggccatcctctgctacataataccaatcaatgaaggtaaggtttgtagaaggaagcagccatgcttgaaagtgatatctaattgaggggcagaaaaaagtgatgaatcagagcaatacttgagatagggtctgcccacttctcatgagaacagcacaggaaagacgggagacttaagagcagcagttcagggagagagagttcagttcatggagttcagaggcagtttttcttttcttttcttttcttttcttttcttttcttttcttttcttttcttttcttttcttttcttttcttctcttctcttctcttctcttctcttttcttctcctttcttttcttttctctcctcttttttaaacagtgaatatttttttataccaaatcatggtgtaactgtcaagggggctgagaaagaacattctaatctatgttggggagagaacatgagggcactaagtcattgctttgcacaatgtgaagtcaataggtgatgggacattcatgtctgaaaagccaagaagctacaacaccagtgtgtggtctagaacttgaaggaggcacctgtcagagcatctaaataggaaagggtaggatgaggcaaaggttctctcccaaacccaagatcacttggttttcacaagtacacatactgttttttgtttctttgttactttttttccctaagcaatgtctcactgtataatcctgactagactgaaacatagagattactctgtttcctaagcgctgagattaatggtgagagccaccatgcttggcccaaataaagtaaattttagtaaatgtatcttgtggatctgaaagcaaaggcctgtaatctcagcgcttgggaagtggaggcagaaaaaccagatgtttaagctacatagtcagttggaggctagcactgattacaagagcccatgtctccaaaagaagtagaccaaactaacaaatctgtcagggtcactgtgtgactcagtggtaaagcaggaagccttgcctgttgaggccctgggctcgatccccaccaatgccaaagttaaatcacatggatccatgcaggttgtgatgactttgttgttacttctgctctgtcccaccacagtgcaaggttctctgctacaaggactcctgacctaattgctaccaccagtaggatccaaagcacactaagagacttaaagtccagcccttctctgctgtagggagaggcaacagttgcctctgtataaatggaaatctgtgggcagggttatttgctgggaagactaggccacttcccctgtgggcactagactccctggacggtcaggactggggttgcttgatggggactaaagccaaggaggaaaactgttgcggagctggtgttaaaagtggcctggccggatgcagggacactaacctgacaaaaactagtgttctgtgcctatgtagttaggtccagtgtcaagacagacctaatgtgcattgctcctgacttgatcactctagtatggttaatgctactagattctgctttcatcgttgaaactgaggcaacatgaccaagctaattggttatttcaaggagtcataaggaaggacatgaggaagatttgcgtataaactgtgtgttctagaagtggtggctacttagggcctgccacagctgcaacttactgctctctagatgacaaaggtgcagctgtcaagggaaggaactgtagtacaaccactttaagattatccctgactagtttacaaataaatgagactcagaccatggttattttatttggctttgacagttactggggggtaattccctaatctacacttttagctgctgccctggctacctccccagtgttatacctgatacttgctgtttctcctggccatgctctcacaggtccatttcccctcacagctgcttcctcctctcctctcgttcttcttccctctctacctggtctaatttttaatcccaatcccaggtttctactcagccttgatcattcagttcttggatagaagacatacaacttttattatttacaatgagccttaaacagaacaagaactggacagatgtgtccgttttatgctattggaatctactttcctatagttatatgtcatacaggttgctctttactccagttggccagccctcagggctccattttcatgacttaactaacccatgatgacttctcctttcttcaccttctctccatcatggttctcctctgatcccccaggcctggtaaccctaaatcctaaatcctgcttgtgtctcttctgcccaactattggctgtcagtatcgatatttattattattattattattattattattattatttacaatccagttgttgcccccctctgggtccgccttcccacagttcctcatcccattcctcttccctcctgtcttcaagaggacaacccctctgccaggcctccccactccttggagcctcaagtctcttgagggttaggtgcatcttctctcactgaagtcagaccaggcagtcctctgctgtatgtgtgttagggacctcatgccagatagtgtatgctgcctggttggtggctcagtgtctgagtgatttcaggggtccaagttagttgagactggtgttcttcttatgtggttgccctcctcctcagcttcttcaagcctttccctaattcaaccacagaggtccccgacttcagtccaaaggttgggtataagtatctgcatctgtcttattcagctgtttgctgggcttcttggagaacagcagtgttaagctcctgtctgtaagtacatcatagcatgagtaataatgtcaggattggagcctccctttgagatggatcccaagttgggccagtcactggacctcctttctctcagcctcttctccattttacccctccagttcttttagacaggaacaattctgggtcagaatttttgattgtggaatgacaaccccattcctccacttgatgccctgattttctactggagatagattctatgggttctctctcctcactgttgggcatttcatctaaggtccctccctttgagtcctgagagtctctcacctcctaggtctctggtactttctagagccccccccccccacttcataccccacccccaggttgaatattcccattcattctgctagccctcagggcttctctcctgtctccctactcttccaatatctgatcatgttctccttttcccctccctcttccttctcccacctagatccctcctccctctgcagaggccgtttttttttttcttttttccaagcaaaaacaattcagtcagaagctgagagaagccaatttgaatcagtcagcttgaagtggagtttgagccagaacatctaaattgaaccagataaccagaatttagagtgagtttattcagtaataagtcatggtggagaaaatattctaggcctacgttagaagctcagagactggaagctgaagccttcaaagtctgggcttgtagaagattagattgtacagaggccagaagcttccaggcctaggcctaggaatagttagatagaaataatcgggttcagcccaagtcatgtattcataaagcttgtgtacagctcccattatctgcagaaataaaaaagacatttacaggaagcaagttctttaacctactaagccatctcacaatctaccacttccaaaactccaggtttatatctaaaaagaccacataaaagatttaacatttccattgctgtgccttttctcatttttataccatataatatgcatgtgatttctcagagaagagatgtttcttgtcagttactagcatgatgatatctggccaatctaaatctctaaataatgccatgatagaaagtactgcaattcacagttgcattcttagctgtcaccctaactgcagcagtggagacaggtacctgatgcggcagaagctctcaagtgctattctatcttccaaggactgagtcagaatggggccattctgctacttgttgtcttctcctttcaggaattccagttagtgtcattgtttatcagagagagtctaatttccttgatcaccaaaaagaaagaaaccaatggcttgaactgtgctcaggggacagatgtacacttgcatgtgaatggaaatatattaatctggaatcgtatagaaacagaatgcatctcaaaagtgaatggaaaaaaggttcacagagtgatcatcaatttaggcctctaagagtattctcttagagtctgcagaaaggagctgcaaggaagactaactttgtagatgttatattgattaaaggagaataaaagcagagtaggtgacagatgcatttatcaatatgtgcatattatcaatataagtacacatgaaatataactaaggtattgtttcagaaaaatgtgatatgagatggtggccatgaccaatgaatgaatgatggctactcctggaaaaggaccatcttcagagatagcactttacaaaggtccacgtgtggcatttggctcagcccttagaacagtgtttctcaaccttccctgtgctgtgaccctttaatacagttccttgggctgtagtgatactaagacataatattattttcattgctactttataactgtaattttgctactgttgtgaatcataatgtaaatatccatgttttctgatagtctttggcaaccccaataaagggtttttttgacctccacaaaggggctgtgaccccattggttgagaactcctgacatagttcttttcactccaatgtgagtagaggagactgaacatgcagaatttaaacaaaggaataatgagactgaatgtaaatggggctatcatctaaagcctgtcttttccatttacaaatctagacaggatagaatatgtagggaaatgtgaggctctcccttttctgcacttcctcttgcttctgttcctactacagatgccacaggaagcagccctgatttgtggtcagatgagagggaggtgggaagcaacatcctaaggaaaccctcagaagccgacccttgtgattttctgctgcccattgttatccatgtggcaggatacaaaagcttaaagacatcttctgagacgtttgtgggtagcttcagcattctcattaattaggaaattagattggtggctagaaattggaaggtaaggaatatctgtctttgacattgaggaaatgaagcgtgggaggggagatgagagccaggcttttcacatcaaactatagtggtttcctagcctttgctttgggggtcatattcacttcagcaccaaagctggtccctgggcaggctggttagtccttctaaggatggattcatcttgtaagatttcctatataaccatgattctgagtaatataaataacctattgattgtaagtctttttttttccttctcctaaattgcccatcagactttcttgtttaaaattcaaatttaaaatgtgattgcttttgatctctaaaccaatatccttgggcttatgagcttgtggctaatacttgataaacagtaaaagtatctgtgtttttagtgtaattctagacttcaagttcccctttgaagcaactacttcctactttgtctacttttgctccccttgcataggtctacaatcacaataccttatgaccttgtgtgatctatagggcctgacatatagatactggtgtctgagcctagaaacctgccctaacttgcatttgaaggttttttttttattgtttactgagaatttcatgcatgagtatatttgagaaactgttgagtccatttagtgttattcgtatgtatatgtgtttaaggctattcaatggggtcaaatgccttagcagggggcttgtcctataaaagactgatttctactttctcagcaggcattaattgcttgtatttcttcatctatgtaggggagtctcatgagatttctaccatctacattaacatgccaagtggtgttatcattgtatggatcttgtcaaggcaaccatattgttgagataccacaggttcaccttccctgcgcgtgtataagacattatcttatgatggacatcctgatcctgttattctaacaatattccttcctatcttctgcaaagctccctgatatttatgaatgggggcgggagaagggtcttatagttgtaccaactgaagataggaacctcacagtcagttgttttttcatttttaccagtttcagatttctgtaatggtctctatctattacaaatagaaccttttagatgagtgagagctatgatcactagtaggaataagaatttagaatgctattgggaattaaactggcttagtgaagtacccatagtacgttatgttcatactatcattcaaaatttctcttctattaatctgctcttaagtcaaattagacagctcaatggttactaccccccacccccaatataagcaccactattgtgcccttttggatagactattgtattgatcattgattgttgtggtagttataggctttatacctgagtgggactagtgattgcttttctaccctcatagcttatttataatcttcagattctataagaactagtcctcaagaaggaagctttcaggtcagtaccagctcaattcctccaagtcctatatccaccaggtttggaatttttagcaatagtaccttaaagttcagaaggcaaccaaaggcaaaggcagtaatctatattgttttgagagtcttttggccttccctgaccaataacttgaaggcaggttttccatgtctaacatttgtttttttggtagatattataatggatcttacagagtgccattctcacaagtactataatctcatgtggtgtgtgtatgtgtttatttctgtctttctgtgtatattataaataatatatatatatataatagtattattatatattattttaaatagacataaaatgtttccttatgtccttttcaaacatccttagtattatttatccctcctcccattcccttcctctgtattttccctatctcctctttccaattaaagtccttatctcattttttctatttcccacttcaaatcacctatgtcctaattttctcctccctcttccccataagccctttttagttttatgatttctgtggtctgtccagcttctatactcacatctaaagacttagaaatagggtcaacaaataagagagaacattggtgtttgtctttctggatctggtatacctcactcaatataatattttctagttacattcatttacttaaaaaaatccatgatttcatgaatgggctatgaatgtaaacagaggtctcaaaaaaagaaataaaaatgactaaagagtatttgacatgtttagcaattagaaaaataaaagttaaaactactttgatatttcatcttatccctgtcagaatagcaaagatcaagagaaaaaaacacggcaacaaatgttgtaaagatttggggacagggaaagatccacttaatgttcatgagattgcaaaatgtcaaactaatagagaagtcagtgtgggaaattcccaaagctaatgtaaatctaccatataacccagttgtaccactccttggcatatgcccaaaggacttacatcctgctccacaggtactttttcagccatgttcattgccattttattcactatagcaaggacaacaacttaaccgtctcttgtctgataaatggataatgaacaaagtggtacatacaaacagtaggatactactccactgtaaagaacaaggaagcatttgccccactgcctctagtgctggcagcctgagtttcctcactgtgcactctatgtaaatgagaagaatgcccctcttcctctgagacacacatggtacttatggaacccagagcaacattcctcatactgatggcttttcttgaagctccatctataagactggcaccatgatcctctcctgaggtagagagtagtgcgttctgggtgtcagttttctcctggatgtgtgcacagaacgatcttattgatctttttttccaaacaaacaagcaaacaaacaaacagaagcaaaaacgttccagtaaccaaataatagagccagaactcatatccactctcttgttagctgtgagtaaagtccaatgtaaaatcagtctggattcctgcatgtctaagaaaccttaactttctgcaagatgcatggtcatttgtcatcggaatgctactgggtttggttctggattagtgggtaatcagggctggtcgatagcacatttgcatatgtcatgcaagcaactaatattgcgaatatctgagtcttatgagagaacctctgagactttccttattaacctccagagcattcacatcagtttggggaataaaattataataagctcttaccattttgagggggagtgatgggcagagtgggagaaatagaagactaaagacctgatttgatctgtaaatcacaaaattaaaaataaaccattaatttggcttggtcaagatgatacagggttttaaaagtgagagaacttttgtggcccaggtttgaatgacacaaggatttaataagccaagatgatgggcattcactctcattcaagtcttaccttcaagtcctggaaggcaatcaagggaaacaccaagagcctgcctacacggtttgaggagtctttttgcctcccttgaccaacaattcaaaaggagattttccatgcctagcactaaagtttttgtcagattgtctgcaggtcttggggagaacattattacttcaagtgttataacttgtgtcaatgagaattgatgatgtggattttcttaggagtgatcaaagtgaaaacaggctttaataagaattattattaaaaaaaagaattattactgaaaagtaagaaattgaggggaaattaaggaaaattgagagggagaaagacaggtttttcaaaagagtcaaagctgttgagtttgatctactggtttaatagagcaacagcagaaactgcccagacactatagtcatctctattgagatcagataatgatttcagctatcatgggccaagtcactggagggtctacacaccctgtgtaaatccctgtagctcaactggagaaacagccatgccctgttcatgggctatcctctagttagatacccatgcttaatattgttttcataattctgatcaaaacatgaaatgcatcattgtaatgtagcaacataaattggattctataggtataatagcaattctagaaagaaaaaagaaaccagatatatcttatgttattaacacaaaggaattggtacaaccaaaccatttgtatggtccttaatagagattaatcaaagacttttcttactaagtagctttccaagcaatctttgtctattattgtagtaactgtacatcttattctataaactatacaactaacaccatgtttgctgacttgggggtttcattttttgctttatcagccacaagagagaaagccaggtaccaactgcccactggatgatagcaactgaatatctgaaccttggctgcatatccatactgaactgctgtaatggatttctgagtgacagaataatccttggtagaaacattttttagggtttggattattttatgaagataattacatgaaccacaaaataccctgattttgtgctatggttgatcaacatgaaattccacaatgcggtatatcatcctaaactcatgcttttctcttctagtatttgatgccagttgttctcctcagaaagctcaaaacacaaattgagatctaaacttagtgcccgaattcaaagtagatgtcttaaaaacctaggatttcctattgctggaagattttaatttaaaacatccaaccttcccactttgaaattgttcgtttggcctactctgaatttaggtaatgatactttggatgttatgtagctcagactggcctttatgtcactatgtactagactctaaacatcctctagtaagtagaggatcactctgaacttctgatcctttgtgcccacttctggagtgctggaattatagatgtgtaatttgatgggaacactatgacctttgatgaagtgctaggaatcaaacccagagcttcatggggagacctatagaggatggggatgaagaatcagatgttccagagtgttcaggagcatcacaagaacacagcccacaaaatcaactgactaggactcataggggcttacagagatcagagagcttatagaaatgtgacctaggtcctctgcatatatgttatgactgagtagcttggtgttcttgtgggattcctaatagtgggagcagggactatctctgactcttttgcctgctagtggaacagttcagtactaaaactactcaaaatgggtttccacatacagtagatgagttctagtgtagtgaagtatacacaggtttttcaccataaggagtgaagactagaacaattccgtcgtaaagaaagggtatattttcttttgccattggtttatttattcattttatattctgaatgctgccctttcactggttcccacttcatagagtcattctccatgcccccactttctcctctgagggggtggggctccccggatatgcccccaacctgctgaatcaagactcttcagggtgaggtgtatcctctttaaggccagacagggcatctcagttggagaagagattccacagacagcaacagctttagggactgcccctgctccagatgtagtagccacatggagactgagttgcacatctgctacatatgtgctgggacctcagtgcagcccatgtatgttctttcattttaaaaatgtttgtgtttttcttatttctttgagattttcatatatggtttgcttcccccaactattcacagatccactcctccttttcctacccatctgactgtgtgtccttttttttttttttcatatccgatgaaatccaatttttttctacccaagttttttttcgatacatggtccactgggatttgcttgactttgagactctacatttagaaaaacctgtctgtccttatcacattagctaacaattgccaatagttccatggctagggttggggattttagttcaactctcatctccatgctgggatttggcctgctttgaaaatgtgccccgatatattctttttctaatatggttttctcagcatacaattctgtcattgttctgtttaaacttgtgcagtggttcaagatccagaccacttgcttcagcactatgagtcccaacaagttcctgactcatctatccatcatgaagtaccaagcttcccagtaatcgttctctgtctttttcttccctcgactcaggagcaacagagtttccttaaccatcagaataaaattccatgcagacatttcatttatctttctagtgtatttttaagagaaaaggcagtaatttgtacatgccatttttctcagtgttaaccagagtgctttgttgtacttcctgctctgtagctttaagcttcctagaaagaaaataaaccaaaaacacaaccaactaaataaaccaacttccctcctctccctctccttcctctctccctccccccatctctgtaatgctggaatattcttttgtgtggggaaaaaaaaacaacataatatactctgagtcttacatgaacacctttagtttattgttcagtttgtgattttagatgaatgacctctcagctgggccacagatctgcctttagggtgttttgtactatgataggatgtcatgttttctcttcttctcatagatatttttcacagaaagtaacttacttgaccagggaacttaccttaatctaaactaatccattcatcatggagaattgccttcattcacgttgaaggagaggaagggctggttctgcttctgggttcctttatctcccaaaggaattagccagtttagggtgtaactctgtagctggaataccaagtagggctggtgctttccaagaaattatcacgctcctcccctgtgccctctccctatctgctaaactggtaaatctgagaagtccactgatacttaactgtgcctggtaagaacagaactaagtgccagggaacagatgagaacaggttaggtagctgacccacattcaggtgcttgggtttgttgcagcactttccctcacccactggatttatttaccaaaaaaggcaaggtattaaggtctgtgagccctctgctgggcagaactaaagatactgccacccaccagcaactctcactattattgttaacaaacgtgaagattttctcatgattgggggtgggaggggaggtgtggtcctgcctgttcaaggtgatgactctaaaaagcacagccttcccagatcaagacatttaaaccaagtctgaaggagcaaagcaaaggaactaacttattgtattgtctacccattcatcttcaaaaacacacatttactcctttactcgtgtgtggcatgttctagtgatattagactcaacagtactgatgcacgtgttcaaaaaagcaaaagaatagaattacttactaacccttccatttattatagaattagatttgacatatttgtgtgcttttacttatatttaacatagacctttgtacaatcagtgtcctgattttagagcttaaagatcaaaatttcatcagtttgtttcagtgctgagaatcatgactagcttagtgcatgtcaggcaagatacacaggaggaatatcaacattattatcatttattaatcattcagcagatacctactttataccaacactgtatcttacatgtgagtactaagacatggagaagaaaagtgaccatctacaatggtgctgagctttttccaggggacttaaagcatataaagagactcataaaaggaagagcaatattttagaggtagagaaaccaagagggaggaaccgtaccaaaagataatttggtcataatttgtgagctggtgtgggatatggtgtttgtgtgtttgccagagaaagggtgccatggcaggcagtggatagcagagagataaattggtagatgtgtgccttataggattgtgtgtatgtgtttctaatgttattttttctctttttattattatggtttgtttagttgatttgcctgtacatactaggcaagtactctactactgatctaaatctcacaccttgtttttaagagaaatttttatcctgtagtatgggttacctttgaacttgctgtatagtccaggagtattatggtattttgagatcctggaatccaggaaatggataatagtgaaaaatgaagctagtattttagttgccatcagggtatgaatgaccttgtgctagcgagattggatgatacctattcagagaagggaagtcatgaacgacaggaagcagaatagaatggtggtatctgctttgcagctaagaaatctgtctcagaaagacagagagaaaatatgtcagataaagctacaacaggcagctctttggtttcttatggggcagagaagaaaagaaaaggagaaagatcatatcaccctagaaagaacacaacctggaaaacttcaagttgtagagactggttgtacaggatgaagaaaagaaaaataaaggaagacttgaagtggagatgccacagatgcaaggatgggaaaataaaggtttgctgtcacaatcacaacttgtactttggctatcttgagtttgagatgactatatgtaaacatacccagtaaacagatgaacatatgggcctcaagctcagagatatgacttgctgaggtcactggtggggctcctcagcctcaggaaatgacttagagagagaggtgtaaagagaagcagcagagagaaacaagtgtttcattttcacttagagggatctgaaacattattggggatgaagtttgggtaacattttgccttagtgagaacattacttaaaagtaagaatttcaaaacatttactctttaactttctatgttcaaatctttatccctgagtctacacactttagcattttatattgagtatcaaccaatgtatgtttataagaaatcatattaaattagaaatgacttaaaataaactcaagatgaatttaaactattttaaagtatcaaatagcacccgtgataaaatatcaaagatttagttctttttgggtgggcttgggaatgggaaaatggaaaaggatttcatttattttgattcaagtatgaataaacattgatttttacttatgtaaatatacataactatttctgaaaatgcctagaattttaacctttcaaaacagagaaagcattttagatatcattttgaaaaatcttatttctcacagatgagaaaactacagtgagtttgagaaattcccttcctcattcacattgccacttaaaagctctgggaagctcttcagaatattaaatactgttttatgtgtaaaataattaataataacaatagtgataataataataataataataataatagcagtagctaacatgtgctgaggtttactgggtatagtgacttttctaaatattctacacaaatcatcttacttaattcttacagcccctgtgcttgatgtgttatttctgagtctggttagttacagaattgaggttcaagtgtagtcactaccttgttcactctcattctttaaatcacaaagctgtctttggagagcatttggcctaaatgctatccataagtgttgcccacatggatttagtattttgaattgaggatattcaacccaatttttttttggtaaaatatgaatcactaaaattctgtgtccccttaaaatatccctaatttatcacaccggacagcctgtctgcctccctggaacgcttagcatcaagcaggtctttgttggggtctaggatcctgtttctttcagattacataatgcagcatgtctgaagtagatcaggatgtagctaatttacaacttccccgtgtggtttctgaatgctcctttttcatttcttaggtgggaaaatcagtactctattttcagactcctttatatactctaggcaacagttaaacatttaactcttagcaatttatgtttttaatgggatagggttttccttttggttcattttcacagagtaagtttggttgtccaaatacactgaaaatcgctgagcattatggtttcaacacatgtaagcctaaggccaaatatgagtaacacatgatattttgttacatgtcatgaacaaaccactgttttgcagtataatacaaaacatagctaagcagtttagatcactatcaggcattacaaggttaggtttttcaatttatgtgattactcaaaactcattagaaatatattttctagctctagggaatgcggcttagaaaactgcagttctctcttgtgaaaatggtgtattttagtctatttattatgtttttactttgtcttaattatattctttgtacttctagtacaatagtcaaatttacaaataaacatacactatattttgtcatgagccaaaaaaagagtaaaaatgaacgggaagaaaacgtactgttgttatttattagcttgctctctttcttcagaatatcacagagactctaacaatgagatcagtattacatatgacacttgctctgaacaaaagaatagctgtgcagtgaagaccttgaagttgttctgttactgggatgcaatcaagagccaggttggccttctggagcttttgtttcctcacttagaaaatgagcggtcttgtgtgaggttaggccagtgcctggcaaatacagaagtggatgctcacagtcagttattggatggatcacagggcccccaatggaggagctagagaaagtacccaaggagctgaaggggtctgcaaccctataggtggaacaacgatataaactaaccagtacccccagagctcgtgtctctagctgcatatgtagcagaagatggcctagtcagtcatcattgggaagagaggccccttggtcttgcaaactttatatgcctcagtacaggggaatgccagggccaagaagtgggagtgggtgggtaggagagtagggtgggaggagggtagagcggatttttgggatagcatttgaaatgtaaataaagaaaatatctaataaaaaaaaaaggaactgagcctgtcctctcatcccctgctgtgttggagctctagagcagcaggtgagggatgacattagctatgcagttgcacctgtggctctgtgctgtgggtcctgttatcttaagcactccaactaactttgtggagccctaggtttcaaatcaatggaacaaggtagtgatagtgtctacagaacaggattattgtacacatgaaactaggtgtcatatgcatgttccaaggcccaggtgtatgtgaaataacttcttactgctttatcagctctgaccttctcatcacagtgcagatatcaccactttatttttatgaagggtaatttaaacattttcttgtacatacctactactaaagttttacttaatatctttgtatacaacaacaacaacaaaaaacaactagtcttactcttaccttggccttgaatgcagagtaagtctcattttaaaatgctggggatttttgctttttgttttgttttaagcaaaataaagaatgatcatgggcaatagaagggtcattattggtgcctaataataatttttttgctttagaatgaaactattgaccttattttttaaactgtttcttcttgagagcttagaggcctaaaggaaaggccatctggatgttgatatgggtaagggatggggaggaaatattgaaaatcttcagcctataagtatgaagtgaacattcattcatggaaatactttcacatatgtgtactgaataattattgaggtctgaactggattaatagacaaagaataaatagacaaattgaatcttgtttatgtgtggatgtatgatatgagctatgcaatggcatagtttatattaatttgtttgtgtgtgtctgtgagtgtacaaacatgccgcagtacatttatgaaagtagaagatatcttgcaggaatttgttcttccttttcatcctgggattcgaaccaggtcatcaagtgtggtgatctactgagccttgttcttgggctcagactttatatctttctttttttgaatttttattagatattttctttatttacatttcaaatataaccccctttcctggtttcccctctgaaaaccccctatcccattccccctcccctctccctgcttctatgagggtgttcctccacccactctgcttccctgtcctggcattcccctaccctagggcatcgagccttcataggactaagggcctctcctcccactgatgtccaacaaggccattctctgctacatatgcagcaggagttctggttggcagtttagtccctgggagctttgggaggctctggttggttgatattgtttttcctcttatgggattgcaaacctcttcagctccttcagtcctgtctctaactcctccattggagtcctgtgctcattggagtccaatggttggctgcaaacatccacctctgtatttgtcaggctctggcagagcctctcaggagacagctacatcaagctcctgtcagaaagcacttcttggcattcacaatagtgtctgggtttgataactgtatatgtgatgggtccccatgtgggacagtctctgtatgacctttccttaggtttctgctccacactttgtctctgtatctcctcccatgagtattttgttcccccttctaagaaggaccaaagtatccacaccttcgtcatcctttttattgagctccatgtggtccatgtgttgtattgtgggtattcctagttttgggctaatattcacatatcagtgagtgcataccatgtgtgttcttctgtgattgggtcacatcactcaaaatgatattttgtagttccatccatttgcctaagaatttcatgaagtcattgtttttaatagctgagtagtactccattgtgtaaatgtatcacattttctgtatcattcttctgttgaggaacaactgggttctttccatcttctggctattataaataaggctgctatgaacatagtggagcctgtgtccttgttatatgttggagaatcttttcgttatatgcccaggagtataccactgggtcttcaggtaggggtcgttccaccaaagcttggtaaagcaaagattattattatctccattttgcaacaccataaacacaaacatttatttctgttagccttagttgataggtgaatatctctggcagagagtggtcaagaagcttgcccactgtcacacagacattaagcagtaatgcttttctatatttcagcctacatgaaacagctatctcattgactactacaagcctcctctatagcactggttctcaactttttgaatattgggaccctttaattcagttctttatggtgtaataacccccaaccataacactatttatttgctactttttctattctatttttttaattaattaattcattcattcattcatttttattggttgttttatttatttacatttcaaatgtcattcccctttccaatttctcctccacaaaccccctattccctcctcccttcccctgccactatgagggtactttcccacttccctcacctactcctgcctcagtgccatagcattcccctctcctgggtcatcaagcttccacaggaccaaggggcccccctccattccccacagtgatgtcagataaggcaatcctcctcactgcatatccagctggagccttggctttgccctgtgtactctttgtttggtggtttaggctctgggagctttttggggggtctggttggtttatattgttatggtttctcttcagatcttatacatctttcaccattttgctactttaaaactgtaattttgctactgttattaattgtaaagtaaatatctgtttttcgttggttttaagtggttcctgtgaaagggtttttgtttttgtttttgtttttgtttttttgatctccagatttacagacttttgactattgacatttggttagtatgtattatcttaaagcacaggtagggactgtggcaccttcctcttcgttgagacattaccatatctttaatcatgataataattctctaatatattttgaagcatctgtatctgtacctgggtttgtctcatggtcagtgcatgttacactactatgtctagtggccagcatgtgtcactataccatgtcacatggccagcctatgctattctacttctacactatgtcagcctccgctcaaactttctacatatctgtaattcttcttatttggtgataataaggacaatagatattcttcacagaatattttgagttaaatattttaatatttaaaaacaaagagctttggaatgcaggacatacattaagtgctcaataaattctgaatgctgattagtttttgtccagttgacacaggttgaaaacctggaaagtataatctcaactgagagaatacctccatcagacaggaaaatgcctacaggaaaatctgagggggtgttttcttgattattggtatataaggagggcccagcccactgggggcaatattattcctgggcaggtggttttgggttgtttaaaaaaaaaaggaacatgaacaaacaatggggtacaagtcagaaagcatttttttctacaaggtccatgatttagttcacgcctctaaatgtcttctttgattgagttcctgtcctggattttctcaacaatgggctgtgattggtggttagaagatgaacaatgggctgtgattggtagttagaagatgaaccaccaaatatgttgctttttgatatggtctttatcagcaatagacagcaaactaagacacctgttacaggcataggccatctaactacttaaaggtggggtacagctttgaactacttagtgatgtgaactactcacacataactctgaaatatcaacacatttgtcttgcttatttcctaaaagtcattttttggaatactgggaggaatatataaggtggataataagtgtacctagacttaagcataatttcagtctcttcggcgctctggagcttggggaatttaacaacactcacatctgtacagtaaggataataatagcactttatctcttacgggatctccatgaggattaatttagaaaattaaagctcttactgtagtgcccaccatatagtagcatgcaaatatgattagttaatgttattataactattaaaaatgaaattacatttgagtctctcaagtatattattaattttaaagtcatggttttggtcctaggaggcaaatgcaatgtacactgctacaaggctcgtcaaggcatctctgagagctatatgcatgtgtaagaccttacttctgggagttagagcatgggttcctgtggcagggatttagagaatcatcttccagaggaaactatcatgtcatgttcagttagctgtagtatctttgttctttgttttttgtttttttatatctcactgaattggtatgtgaaagccatgctttaagatatgggagacttattatttttttaaggattagataagtcagtgtcatagcttactcaaacacacaaaaaaaatcttgagttttgaacttactggagtatttttcctatattgaaattaagaaaaaatagtataatataaaaaataatactttaaagtcacacttctagttaattccacagtgaatctttaaccctccaggtttcatctaactaaatcaaattgggtatgtatgggtattgtatcaagagatagacttataacagagagctctcacaattacaagaccactcacctgtagacaggataaataaaaaatgtgcaaataaagcaagctggctccttactggtaatattttgtaataacaatttaaaatattttctagatatccccaactatgtagaagaaccatttcctaagagctttggtgaagtaaatggcatatgttatggatatattttaattagtgctctttaagtcttaaatatgctatgatgttatggtacctctaggtcactaagaggatcagaagtgttcactactttattaaatttagacctcagtgggcgccatgtctggtctagaacagaaccaacacacttccatgagatgaatttccgctatcaggactgtaatttacatcaactgtttgggtaagagaccatgtggaaggcacgttgtttgttcgtcttcttgtctttattctttaaactaaccaaggaaacgggtatggaaaactagttttgtaggtgaaaaagcaaaggatagagttcagtcgtgtgtcccagatctaagaggtaggatgtggatgactccggttatggttcccagagaaatcctcacctcatggaagtgaggagtctctggtccaccagttcttaaattattcaggaaacatgtgaggaacagacaaatctttcagcttgttgcacagcattagctaaaagccagttaaaactaattttaaaaagtgagtcttccttcttagttcacctttattctcatggctatatgaaatatgattttggatataaagaacatgcccctttcccatacaaaaagtaaagcaaagcagagctcattactgatggtatagaagaattcgaattctactttaaacatgacttgttctgtattgtcctttcaccgttaaggctgtatgattgtgctttgctaactttttgagaaatgactagtttttgccctttaaatatctctaagattttgttctaagatttctacctaaaatgtcaaaattataatgagtataaaactacaagttaaaaattactgaatggcaattatgagccagacactaagcaatatatttacttatctttattcataaaaaaatcaagaactagctattatcatttataaaccataacatttctaatttataaactatacattaattttatgcatgaaaaatatagaatgaataaagttaaagtgatttgcctagatacaagagctattcaatgataacataagaatataaatcgaattatcctcagagcaaaagaagctgtttcaggaaataagttacgcatgtgagaatgctagattctctaactgtggagtgagtgggacaatatgcaagctagacttggtaatgccttatagacttgtgcagaaagggaaggacaggagtgtgacccttttccatttttccctctgaagagtattgacagtctcaaggtccacttggttctccattttagggacttgtaatcaagacatttcatgagatttttatattttgtcaatattgacttttttctgagaaagtctgtttttctcatttgaatataatcaaaccaaatattcaattaatgtttttatacttgaagtggttcaagtataaaaaataatatatttaatggattaaaggtcagccaatgttttaatgtttctcagaacatagtataagtcaaacgattattatatcatgtttctaaaacctatactttattgttttaccatttttcttcttatttaatacttgaactaaagtcccaaatcattcacccatattccataccattttaaacaaattgttccgaaacattggaattgttcctttaaaggacagatggagtcatctttaatgtccagcaggatccttagttataactgggcttaatgaataccctgaaatgatcaaggttacatgaaagctttgagaggtcacctgtcctggccttgcacgcagtcacctcccatgtacctaccatgcttgaagctttatactttcatgctctatgaagtacccatgaaatgtctgcttttgacatatttttgaagcagaaatttatctctcatggtacaagagctcaaatgcccagtaaattttgacaataaactaactggttagattaataagtgtgctttttcttcttaactagcctatttttctagaaaaaaaaagtaagtaaaaactcctgaaaacaagtcacaacttttgagggaaatattaaataatgatactatcccacattatacccagctactctctgccccagggtctaagtctccctgcctccatggctaggccctgctatcagtcttcccagctctggtttgcctgcctcagagacagacgcttgtaccttcccagtcatccactccgtgcagctagttgtcaaacatccccttgacacaggaaatccaaactctggaagcttataattatcagtcaattttatatatcaatagattatcaattcctaagatgccccataataaattctgagccagtattatctactgatacaagctgcccacctagattagacaagttatcccaattattttatccttttaggatactcagagctacttgtggctatataaaactatgtgggtaagggtcatcctcttctctatctatcgtctctagtcctcctcctcctcctcctcctcctcctcctcctcctcctcctcctcctcctcctcctctctctctctctcttcctatccctgtctctgtccgggaaattcccccttccttttccctgtctaatcacaggcttcatgttgtactaatatttaaattaattgggggaaaattctgctacaactactgatgctgtatataagaagaagttttaaataaaagagccaaaagtctaaataaaaacatcccacaaattccataactttgtatgttgtctataaagtttaaagattgaaaactagaaaggacatatgtttcattgtgagctatgagttcaatttttctatactcttttaattttaatatttttgtggtattaaaagaaccaggtacattcttttttcttatgttgtactggttggtaaaattgattttgaatttttcatactgactccctccgtctatttgtactcttctataggtctgctccttagtcacatattcacaattcctcctggagctcactgacctcctgttttattttggctgtgttttccttgttaagtagttttgggaatttcataatgagcaccgcattcacgtcatttctcactctacctttcccactttgaattcttcctgtatcacttacacaacctgctaaatccagttagcattgctcatatgtgtctgtatttaaggctggacactgtgactggataatctatcagagagcttacccttggaaatgactgattctacctttcttaacagccattaattgtctggagctattcatgtaggggtgggggcttgtgaggttttctcatctatcttgatttaaaacaaaattatgtgcttttgtgttttgcctatatgtatgtctgtatgagagagtcagatcctctggaattgaatggaattacagacagttgtgggctaccatgtggatattaagtattgaacttgggtcttctggaagtggacaaactgcttaattaccaagccatctctccagccttccttagcaatcttgaaacatcaactggtacaggtcttgtttagaccaccatattgttaagatttcaggggagcaactctatcatgtagtggcctttctaatcctcagctcttacaatcttttatacccttcttttgtgatgatcacctggccttgggtgtagtagggtttagatggtagatatgtcagttaggggtgacactctactatcagtgttctctcaattttgtttttttatgaatgtctctgatggcccctatcttctgtaaaaagaaacctctttgatgggggaactatacttacctatagatataaatattgttacttagaagcagttggtgattatactggtttgggtggtggcagtagttggattccaccagccatcagtaatcatttaagtatgattttatacttattagtggaccttaagtcttaaggatggctgttggttacctccaaaatacaagtgccattattgcatgcttggggatatcttgtcatggtggtcattgtggtttgaagtattcacagctgggtaggacctttaattgttttcttcccttggcaacttatagaagcacctcagataatataagagatttttcccatgaaggagacttacagatgggttcttgcttaattcttccaagtgcttttctgaagtacatgatgttttcaatgataaggtcttacttctagtactaggtattgtatagatttaagagttactcagaatgctctaatcaataactcagagtgagctttttcctgtctggcattgtttgatgtttccaacatggctgagacttaagaacagacagaaatactgaaaagttagatgaggtgggatgttcaccctctgttggagtagtaccaaccaggcagcaacctgcaacctcagaatgtttattatgcacaacacaagaggaggggttagctagtttctgtaggaggttgtcatgggagcagtttcagactgaagccatccgtgacgaggatttggatagttgtatttggacacattggaatcctttgtaatcactcagacttgtgctggaggaagactttacccctcttctctgagtcttgcccagaggaaagctttgccatgcctatgggtctgaaccaatgggatccttaccatggctgtgcccatgtcaaacagtacacatccacttggaacttcatcttctctttcacattaattcattcaaggcttccttctttccccactaatggagtttctgttagtctgtagctcttgaaagcattatcacccacttgatcttttgatgccagttacaaagccaacataatgtaaattattttctcttcagtgggtttctatattatatatcattagtgtctttgcttgtgatttcttcatattttcatagaatagtacttgatatcactatttgatggcttataaaatccctattctaaaatggtggcaatacactctgagaaatgttatttatttttatgtggacactaaccttgttttcttgcttatcaaagtttaacttatgtttttgacttagtggatcattatctgtgtgtaagtatcatgtaaccaacatacttcaatggagttgggggctattttttgcatcttataacctgtttctctttgttacttctggatcagtgagtttaatcaggactagaaatgaattgcaacaatttattgatatatattttattcatcctattaaactgatatatttattgatacatatgtcaacatatatggatatttggtaccattgttgtactattgtattaagttgaggaaaaagcaagaaattgaagagataaaaaaaccaagcaaacaagaactatgtacaatgattccaacagaaataagtctgctacaccaaatgctctggggtttcctcctgtttcttactttggcttcttctgcctttccatgatgaaaatgatacagcatgaacactcacagagctaatcaactgtagatgtgaagttgcatttttctacctgggttcatgctcaaagggacactctcaatggtaacatgattgagagtagctgcctaaggagaaattgcaggtcagcattcagctgtcctggtttgcagagcaaagggaccagggaggctaggattgtctgaaagaagaggatatgagaatcattttcataaaagatgcatcagttggagaattctgtgttaaaaagaaggtagatgggggaataaactggagtttggtaaatggcaagaaactctgggatccaaaaactccagtcaagtgatgggatgttgtgagtaatgcagaccatctgactatcttctccttcacaatttctcagtcactcttcaacttagctttacagtggtcatatgtcccagactgcctgggatggggcagatttaacatgtttctgcaattgttaggctatgtgatgcaaataaggtttggaaaacatgattattcttcttgcaacacctccctcaacttgtgatagcctcatggtgtgcaaccaaggaaagcatacaaaaatcttcaagtcaatggtagtgcttcctgaatctgttgtcgaacagtacagagctctacttcaaactatgatttctgaggtatctgttttaccctacacacttcttaaattcagaatcattttgatgtagaaaatactggatgactattaagcaagggacccgtgtaatcttgagacagctttgttggtggacagatttgggaagacagtgagccagtcaggactgttcaaatgcccatattcttggcttcttggaagagtgcatcttacactgtgagtttttacttttagggatgtttaaactcctaacactttgatattaaaattgcaagtttgaatctataaacaacatcttttctcttggaaagaaccataactttaatcatcttctcaatataggaaatactaagaaggtttacaggtcaaggcacatagacctgggatacaagagaattccagaaaggaaaggccgtgatcttagacttaactgccctcctgttttcacctctctttcttcctcctttccttccttacatttcctctcttttcatctactaattgttgacataacaagagtgttctttgcaggttagaaagaacatatcaacctacattccaacacagaagacttaatttcaaaatatggccttattttcaggtattttcaactttgtcaattaacatttcacaagatgtgtatggtatgtgttgggatgagggtcatgtgtagggtaggtgtctaatggtgtatatatgtgttcttgtggtatatgtgtgctatattataatgtctatgtgatgtgtttcatgtgtatacgtgtgtgtattctgtgagtatgtgtgcatgtatttgtggtgtatatagcatatgtattatgtgcatgtgtgtatggtgtgtgtttatgtgtgcataatgtgtataatgtgtgtgtgtgtatacatgtatatgtgtgtggtgtatgtgtgtatatatgtatacagtgcatgtatggtatatgtgagcttattacacacacacacacatatacactatatatatgtatatacatatatatgtgtgtatgtgcatggtatatataatgtatgtatagtatatttatggtgcatttggtatatgttcatatgtgagtgaatgtgtgcttgtgtgttccagaaatagtatgtatgcacattagtgtgtataatttatgtatgtctacagctgtgtgcgtgctgtgtgtatatggtatgtatgatatgtgtgtgtgtgttttcatttttccaatgcttctcacagtcttgtcttccttctgctctctctctcctgctatatatgtgtgtacatcaaaactgattctggatctgtgacccagtaaaatccagcctggtttaccttgcacttaatattctccagctgtgttgtctcagctctagggagactttttcctgacaagcatatgtggtttacagagccaagcaattgattggaaacttcagggctatgagttctaactctgggtctgccctgacacagcgtgtgaccttgggcaattcatttgatctctgtccaaattctctgatgcttgataacaggattttctagacatctccctgccaataaaagcatatggaactactccttgttccacaggggaaggctacacttcattatccttcagtcttttaactttctttctgtttgcctatctccccaattcggggactccattgtctaactgtggctgttctcccaagccttagacacacttccccccccccaaattccatcagcaatatttctgtatttcagtcctctcctttgtttctaaatgtttggctcacaataccaagttacttttttggagcagtgaattttgcagaaatggattctgcgggcttcttcattgctactgtaagcaggatagctaaatctctcatttttctgcattctttaaagtacaatttattgttttattagcatccacaaaccaccctgatattctgtttttcttttactttttttctttcttaaagaagcatgtccttttatagaaaatgattaagttaataaattttgttagaagcaatacaattccaagattttttggaaagaatatgcattattttttcttttggtcttgggtagaagagaatttattttgataatagatgcttttaagttttgggaacacacagagacataatcaggaattttgtgggctggcataggaacaaaattgtttgtaatcagttttcaaattcatcattattattgcctcttctgaagcaatagttgaaaatatttctaatatttttgcttaatgcatcaagactatttgtttctccgggatcctgggttttgatacattcatccatcaggtttatcattaatttctgttaataatagttgtgtgttcttgagcccaaataagaacaatacccagtgtatggttcatagtgtgtcaatcacctaggcctgagttatacacttagcagggtacgtgtctaattggaaaccttctgactggaagtcttccttggggttgagcagcccctcaagggtctcctttagctctagctagatcatcattccattttcatttgatctttttttattggatattttattgatttacatttcaaatgttatcccctttcccaatttcaaccctcctcagaaacctcctatcccatcctctctccacctgcttttatgagggtgtgcccccacccacccacccactcctgcctccccgccctcacattcccctacattggggaattgatccttcacagaaccaagggcctcttcttccattaatgcccaacagcatgtggaagaatgcaaatcgatccattctcatctctttatacaaaactcaagtaagtccaagtggatcaaggacctccacataaaaccagatacactgaagctaatagaagagaaagtggggaaaagcctcgaatacatgggcacaggggaaaagttcctgaacagaacactttgaactcttataagcaactaccagactagaaatgccttactgttatttctatacattatttcttttcagtggaaaaagcctattaaagtagcagtgatatttcatactcattatttattttgatttagtattttaaattatttataatgtataattttatagttaatcacagtaaccctgcaaagttgtttactcttatgtattcacaatatgaataaggaataaggctgttaaggaaatttacctagagctatggagtgaaaaagtgtttactcatctaatacctgtatgtttaactaatgcactcagaaaaatagccagatacacttataggtgggcccactgtgtattatattaagacaacaatagactttattgcaggtagacctgctcaatggttgagagggcaggaggaagagaaaaaacacacaactccttttcatctgtgatatgcacacacaagcacacacacatgcagacaagcgaagctgagtagatatatatttgtttcaaatgagatttccaaataatgttttgtttgaagttgtataaatctgaacatgctttgaaaaatcttgctttccacaatcttgcttatcacagtgcattctttttctcttttgcttctctctctctctctctctctctctctctctctctctctctctctctctctccccccttccttcctccttccttccttctttcttctttccttcctttctttctctttcttcctttctctctctctttctttctttctctctctctctctctctttctttctttctttctttctttctttctttctttctttctttctttcttcattcttatctttgcctcctggtctaaaaatgctaatatacttcatgttcatgttaacttgggtcactgtattgctaaggttatcttgtccttgagatttaagttgcctcagactccattttgtctctccttgaatgttttgataccatcctcatatcagtcccctaggacttgtcatcctcctgaacaatacactggtatgttctgactttgatgcctgcagcctcttccctcctgactgccctttcctctgtaatttaggctgatctatgtgtgaaacaattctttatcctttgcttgagacattcctatccaaattagcccacaaggtactcccttggaatacctatctacaggtaatgagaaaaggtttacctcccagtaaaacaatttaatacaatgttaagtggggattgttgtcttctcttcaaatgtctttagctactttctcaccagcaggtgtctaggatggttattgttgcctgttctgtatcatctcactgtataaacagatgtcttccttctttaggtcatcagtcttccatttaaaatgctctttttttgcccatatatttgcctactctcccatccatgcctttctgaaacttacatttctactccaggaaagctatcagcacattttctaaacaaagatgattttgtctccctagaggtcctggtgcaagcaattaaaatgagctttcactagatatagtaacacagtgtgctccactggaagatggaattgggctgatgatggacatgctctggaggctgcacttaaaccacgttggggaacacacacacacacacacacacacacacacacacacacacggagtataaggtggagaatatataagcaagttcgttttttacttttaacagttactattgagtgatgatttttgaatagtcagtgtttgacattgggataagcactttatcttatttatgtaattgagtatatcacagaaagcacacatttttattttgttctagttagccacctggttcagtatcttgtcaaggaagtgagaagtagctcagcatggaggaaccctactctaccctccatggtcttgagttctatgcaaagctctgtagctacagtggataatgatgctcctttggccagtaatggtccactccatctggtggcatcccttgatccttagttccccattctctgtgatttgctacaactttctaagagattcattattaattaattcattcattaattgtggaatgtcacaatttccatctctcttctaagaacatgccttttccccagtatatgagagaaaaaatgaaatgtgctaagtatatatgctttcattttttttttcctaacagtagtcaggcatcttagtgtatgtcatatagaaagttacatttgatcctccatttttatgtagagtgaatacaaatatctacttcttcagtgtggtgcttaatacatataagaaacatttaggagtttgttgctctctatatttggttgaatgtttcatattaatatatttattcagtatttgcataaaatattcagtggttttgacaatggcctctgaagaaagcaaatttaatgaaaatacatcctgtattccaatccttattttatatagcattatcttataaagaaatataaaaagttacatttcaaagtgccaagagaagagtctcattgtttaatccatgccttttacccagttttgctgaagaccggaagatgcttagataaagaagcaaaggtagattcttatccctggggctggaagtcctctgccagggacagaagacaagaaggctctgtacataggtctagaaagagctgcatatggtattacagccacatgtggaaacatgtggtcttgttcatagctgtttacagtttggactttggacttttttgttatcagcatttactatactgagtgatttttatccaaatttactgcacatgcagtatgctctccagaggcagcctagaggcttaaaccatttatcatcagtccactgatctaacaaatgcctcctatcagtatctccaagcacaaaacatccatactgtgcttgtcaagaaccaggggctgagcaggtatgatttagacatcagagtgtgtcatttggttctccttaagtcagagcccctgtcaggtgggctacctacctcagaccatgcaggtccgaacttgcttaaggatcctgcaccctggataaagaaacacttcacctgaaaacaaaccctgctccttcttccttaacagctgcaagccaaaaagaatgtatctacaggacccaaccatcttcttagttccctcctttgaatcatttctgaaatgaatagatgttaaagccttctctcttccatcacctttattattatggagtgagttctcctttagggttcttagcctcattaataaaataattaaatattataaactaaatactatataaataattgactcagaatcaagctcagggacaacttgaatagactctgagaatacaacactatagatgagctgaagatgctggcggcaccaagagtaaaagatggagaaaaagacatgtcttttaaattagatacagaactcagaggatcagtgagaaagcccaagtgtcagggaaaatgcacttgagaatgcccagctaagggtctgaattcagaggccattctgtctcctgctcatgtgtcccaggacaaagtattgcaccaagaacctataactagaaatagggactgtatgtgaacagagaaaaagcactgttaagaaagaaagtggccactgatctggagaaagagcccagtagatatcttgccatgtggcatatagcctggtttagggcctttgtagttcttgtctctctgatttgtatttctctggctttttcccatcctgcatcacaagtcctgtgtcttagatgaagcctaaggaagggcttttagtcttcctccgcaaaaggacttcttgatgtttcaattctctcctcattcacaagcattaatgatggtctcatgttcaggggaattttccacaattgactataataataaatataagaagccaatcactgggcaagaagaaggtgggacttccgggttcgggagcggaagagaggaggaggaagagaggagcttccttttggattaaaggagtaagacagaaacattgtagacagaggctattagttcgggtagaattcgccaccagaagttttctaacatggaatagttgataaatttaggatgctaggttctgcgcccagagattgttatctgttgattttaaatcaagattgcttttggcaagatagccatttttacaatgttggtcctgccaatccatgagcatgggagatctttccatcttctgagatcttctttaatttctttcttcagggacttgaagtttttatcatacagatctttcacttcctttgttagagtcacgccgagatattttatattatttgtggctattgagaagggtgttgtttccctaatttctttctcagcctgtttattctttgtgtagagaaaggccattgacttgtttgagttaattttatatccagctacttcaccgaagctgtttatcaggtttaggagttctctgttggaatttttagggtcacttatatatactatcatatcatctgcaaaaagtgatattttgacttcctcttttccaatttgtatccccttgatctccttttgttgtcgaattgctctggctaatacttcaagtactatgttgaaaaggtagggagaaagtgggcagccttgtctagtccctgattttagtgggattgcttccagcttctctccatttactttgatgttggctactggtttgctgtagattgcttttatcatgtttaggtattggccttgaattcctgatctttccagaacttttatcatgaatgggtgttggatcttgtcaaatgctttttctgcatcaaacgagatgatcatgtggtttttgtctttgagtttgtttatataatggattacattgatggattttcgtatattaaaccatccctgcatccctggaataaaacctacttggtcaggatggatgattgctttaatgtgttcttggattcggttagcgagaattttattaaggatttttgcatcgatgttcataagagaaattggtctgaagttctctatctttgttggatctttctgtggtttaggtatcagagtaatagtggcttcataaaatgagttgggtagaataccttctacttctatcttgtgaaaaagtttgtgcagaactggagttagatcttctttgaaggtctgatagaactctgcactaaacccgtctggtcctgggctttttttggctgggagactattaataactgcttctatttctttaggggatatgggactgtttagaaggtcaacttgatcctgattcaactttggtacctggtatctgtccagaaatttgtccatttcgtccaggttttccagttttgttgagtatagccttttgtagaaggatctgatggtgttttggatttcttcaggatctgttgttatgtctcccttttcatttctgattttgttaattaggattttgtcccctgtgccctttagtgagtctagctaagggtttatctatcttgttgattttctcaaagaaccaactcctcgtttggttaattctttgaatagttcttcttgtttccacttggttgatttcacccctgagtttgattatttcctgccgtctactcctcttgggtgaatttgcttcctttttttctagagcttttagatgtgttgtcaagctgctagtatgtgctctctcccgttttttcttgaaggcactcatagctatgagtttccctcttagaaatgctttcattgtgtcccaaaggtttgggtacgttgtggcttcattttcattaaactctaaaaagtctttaatttctttctttattccttccttgaccaaggtatcattgagaagagtgttgttcagtttccatgtgaatgttggctttctgttatttattttgttattgaagatcagccttagtgcatggtgatctgataggatacatgggacaatttcaatatttttgaatctgttgaggcctgatttgtgacctattatgtggtcaattttggagaaggtaccatgaggtgctgagaagaaggtatatccttttgttttaggataaaatgttctgtagatatctgtcagatccatttgtttcatcacttctgttagtttcagtgtgtccctgtttagtttctgtttccatgatctgtccattggtgaaagtggtgtgttgaagtctcccactattattgtgtgaggcaggatcttcaaccctataggtggaacaacattatgaactaaccagtacccctgagctcttgactctagctgcatatgtatcaaaagatggcctagttggccatcactggaaagagaggcccattggacacgcagactttgtgtgccccggtacaggggaacgccagggccaaagggggggagtgggtgnnnnnnnnnnnnnnnnnnnnaagagagaagaagagaaagagagaaaagaaaagcaatctgacaagacatgaccatggaggctttcttaggctagctgttgctcctgtggtgactggagcaagcagtttgcttcccctgaaagttgtcaggagaaacacacagtctcttgaagaacatgcagtgctcctttctccttccatgtcctcgtgactttctgtggtactctactctaagaggtaatttcctcaatctagcccttgccccaaatactacttacaatagtggctcagaaattttataccgatttttattgtcacaaactcctataaacagaactccctaagaaaatgcattttctgatttgctaattaagttagcacccaaaaaacttcattgtatttttctgatgtgttatcatttagaagtcagtgtgggtcatagaatttggtgaataatttgtgtaatcattttttgagggaaaagtatttccaagatcaaataacaccttttatttgttgttattgtatttttaaattgaaattataagtgatatgaagggagactttttggagaaactatttgtgtgtgtgtgtgtgtgtgtgtgtgtgtgtagatgatgatattctatcaatgcaaagaagtgtgattggcacattctataattatttgggacttcataataaccagttggaagatgtgacagattctgaagcatggtggtaattataattctgcaagtcattttgcaccaacagccatactgattttttttccatgttcagggcaaacttactgtttatgagaagctactagtattattactctagcacagtggttgcttttctttttcctgtcatacaatactttagagaaacttaaggagaaaggggtttctttcagctccttatttaggaaggggtacagtccattgtatggtggcaagagcatgtgacagctggtcacacggtcttcgcagtcaggaagcagagacgaatttgagtggtttactagccttttcttttgattcagtccttgacactagcctataagatagtatttataagatagggcaaatcttctctctgtagttaaagcattctggaaacatccacatatccagaggtttgttgacaatgaagattaatgnnnnnnnnnnnnnnnnnnnntacatgggacaatttcaatatttttgaatctgttgaggcctgatttgtgacctattatgtggtcaattttggagaaggtaccatgaggtgctgagaagaaggtatatccttttgttttaggataaaatgttctgtagatatctgtcagatccatttgtttcatcacttctgttagtttcagtgtgtccctgtttagtttctgtttccatgatctgtccattggtgaaagtggtgtgttgaagtctcccactattattgtgtgaggcaggatcttcaaccctataggtggaacaacattatgaactaaccagtacccctgagctcttgactctagctgcatatgtatcaaaagatggcctagttggccatcactggaaagagaggcccattggacacgcagactttgtgtgccccggtacaggggaacgccagggccaaagggggggagtgggtgggtaggggagtgggggtgggtgggtaagggggacttttggtatagcattggaaatgtaaatgagctaaatacctaataaaaaatggaaaaaaaaaaccaaatcaaaaaaaaaaaaaaactatcatgtccttaagcaatcctttcatagtttttgaatttgaatatttatcagaagtaccattccctggttgttgagcattgtattcagacagcacagactataagggcttaggtctgagcatcatgtgatagctgatgggtaagacaatgaaatagtcatcattctcaccctcaagccagtgagcctaatcctatctgaattcctggtttctagttctctacctgctccattcattctgcttgtgaataccagataagcctcttatagatctcttccagagaacttcaggagcttcctactaaaagagagtacaatccctcaggaagattacactacaagggcatttttggtttataaggttcccaactattagctattgttgctttggatccagatcttctttgtattattagctcctttccagtatcattgttcatgatctgttgcagtgactttccactcctcacttatccctgaatatgtcctttagaattttttccccatgtctctgttcatattgtttcactgcttgagtggtcgtacttattgtcattttgtggaaattgtccttccttcagatannnnnnnnnnnnnnnnnnnnnnnnnnnnnnnnnnnnnnnnnnnnnnnnnnnnnnnnnnnnnnnnnnnnnnnnnnnnnnnnnnnnnnnnnnnnnnnnnnnnnnnnnnnnnnnnnnnnnnnnnnnnnnnnnnnnnnnnnnnnnnnnnnnnnnnnnnnnnnnnnnnnnnnnnnnnnnnnnnnnnnnnnnnnnnnnnnnnnnnnnnnnnnnnnnnnnnnnnnnnnnnnnnnnnnnnnnnnnnnnnnnnnnnnnnnnnnnnnnnnnnnnnnnnnnnnnnnnnnnnnnnnnnnnnnnnnnnnnnnnnnnnnnnnnnnnnnnnnnnnnnnnnnnnnnnnnnnnnnnnnnnnnnnnnnnnnnnnnnnnnnnnnnnnnnnnnnnnnnnnnnnnnnnnnnnnnnnnnnnnnnnnnnnnnnnnnnnnnnnnnnnnnnnnnnnnnnnnnnnnnnnnnnnnnnnnnnnnnnnnnnnnnnnnnnnnnnnnnnnnnnnnnnnnnnnnnnnnacaagacatgagcatggaggcttttttaggctagctgttgctcctgtggtgactggagcaagcagtttgcttcccctgaaagttgtcaggagtgcctcaatgagaaacacacaatctcttgaagaacatgaagtgctcctttctgcttccatgtcctcatgactttctgtggtactctactctaagaggtaatttcatcaatctagcccttgccccaaatactacttacaatagtgtctcagaaattttataccgatttttattgtcacaaactcctataaacagaactccctaagaaaatgcattttctgatttgctaattaagttagcacccaaaaaacttcattgtatttttctgatgtgttatcatttagaagtcagtgtgggtcatagaatttggtgaataatttgtgtaatcattttttgagggaaaagtgtttccaagatcaaataacaccttttatttgttattattgtatttttaaattgaaattatgagtgatatgaagggtgattttttggagaaactatgtgtgtgtgtgtgtgtgtgtgtgtgtgtgtgtgtgtgtgtgtgtgtagatgatgatattctatcaatgcaaagaagtgtgattggcacattctataattatttgggacttcataataatcagttggaagatgtgacagattctgaagcatggtggtaattataattctgcaagtcannnnnnnnnnnnnnnnnnnnnnnnnnnnnnnnnnnnnnnnnnnnnnnnnnnnnnnnnnnnnnnnnnnnnnnnnnnnnnnnnnnnnnnnnnnnnnnnnnnnnnnnnnnnnnnnnnnnnnnnnnnnnnnnnnnnnnnnnnnnnnnnnnnnnnnnnnnnnnnnnnnnnnnnnnnnnnnnnnnnnnnnnnnnnnnnnnnnnnnnnnnnnnnnnnnnnnnnnnnnnnnnnnnnnnnnnnnnnnnnnnnnnnngagaaagggggttttctttcagctccttatttaggaaggggtaccagtccattgtatggtggcaagagcatgtgacagctggtcacatggtcttcgcagtcaggaagcagagagacgaatttgagtggtttactagccttttcttttgattcagtccttgacactagcctataagatagtgtttataagatagggcaaatcttctctctgtagttaaagcattctggaaacatccacatatccagaggtttgttgacaatgaagattaatgactgcagcagtcatgaaagagaggttacaaaaacttgacaagatctaaaactgagaagtgatacatccaggacatgagtctaggactcgtgccatcttaccaagtaaatattagtatattttaatatcatgtttttaaaattttccatctcattgctggtgcagaggtatagataagttgtgtgtgtgtgtgtgagagagagagagagagaggagaaagggagatatagatgaattttgtgcatgttggcttcaaagttctacagggaaacttttattgtttcatctttgtttaaaatagtttttatataaatgcaaaatactttctcacatttatccaaatgatgagtaaaggaaaatgtgttggttcacagatcataaagtctagaataccttggacttaatcattggagaccaaatatcaaaaccttgttattgggtccccttcttcctgggtgagagttttcttgtagcttgggaggtaaacattagctccataggtctcttgtagctgttgtattgaattgcttcagtctgtgctggaatgcagattcatcttgacctagaatggattttgtgtttgttaccttctcctttcaggagtcttgattctgtactacattattgaaaaacatttgtgtagagagcatttataatcattaatttttatttatgacagtttttttaggggggaggatttggggatccactgggaaacttgtcaattctaaataatttttcatgtgtaaccttggtcataaggaggatgaatgttttagtaggacagagggcaatggcaagcattagatccttttaaaggagtctctcacccaccccctctcactttctctctcctttcttttctgtctctcttcctctcatccaaaatcaatcattctctatttcccatacaacttacaatattatagctttgggacctttctgccagggaaatggagttgagaatatgctggtgcttggttagacatgtctatttgaaatcctggagacaaggccctgtctttgtcctcttagttagctcatttcacttttccttcctgtgaggaacatcttattcaagctgtaataaggcttgagagaatatatcactgtctttttttttttaacacaatgatcatttttgagacatttcttatacaaaagttgacctctttccagagagattgatctatactgaaatggactaatgtggtttagaattcttaatacaataaaattgctcacaatgaactgacatgcagacaagtattttaatgaagtcagttgtcagcacatatctcaagtcatctgccaggaaaatgatacctttagcaggtgtccttatgaaatcaggcaatctacacttgtctttgcaaattagaggagctgcagttttctctaccatgagtcagaagcaaatgccagcaatccagagcatgcagaggcttctaaacacataactgagtatatctggataaagcttactttctaggtaagacatgaatcacaattgtgtgtgtgtgtgtattgtctggttttacacaaatagatacacatttacaatgacaggatttgtgctctcaatcttgctaccgtggaatcctatcatcatgaggcttcttattatcagcaatagttctgtcattgtgttttttccagctttttctcagtttttaactatataaaataaatagaattctctttttctcttttcatcaccacaataaatatgacattaaacaaggattataaatatggtatggattgactacagtttgtcccattgacttttgcgttgaagtttggtctcaggtaagggtaccaagtgggtctggaagacagtacctactctttttttgttgttgttttttttttttttttttttttttttttgagacagggtttctctgtatagccctggctgtcctcaaactcactttgtagaccaggctggcctcgaactcagaaatcctcttgcctctgtctccagagtactgggattaaaggagtgtgccaccacatatgagtacactgtagctgtcttcagacacaccagaagagggcatcagatcccattaccgatggttgtgagccaccatgtggctgctaggaattgaactcaggacctctgcaagagcagtccgtgctcttaaccactgagccatctctccagccactcttgaacattgatttggtcatgctagtggatggtatgaccttagcctggcatttcctttagtctatcttgctcacatcctctggtcttctacatgcaactgttcattccttttgctttctttctcatcatattgttcttcctgcttgagtcctttacttaccagaatccaaataagtgctggtaccaagtcttaaatattcagagctgtgaaataaacagtttactataaagaatgtggactcaggtatatggttacagaccaagatggaaaaatacagggaactttattaaaaatgacagaaatgaaggaattattttattgtttttttctttgtgatcaaaatacaaagtatgcatacatggggtgtgagatgggtggtgccttctcttactgcacacgtgaaactgtaaacaacaacttttaaagataaagattgtattgaaaaaaaaatctctgctgaataaaacaagaagtgaaattcacatggtgacttgagtggaagaactaaacactctatggtttgaaagagagagaaaactcaaggaatacccacatggaaataaatgagtcacatgtgcttagtcccgcgggttccctactatttgaggaggagggccatagaatcagctacctggcagggagaggagtcatagctattcctttagtgcagaagattttctggataatgctgccatctctaccacaggcacttgagcttcattttctcactgggaaaggccccagacatttgtataaaatttgatccaagctatggagtctggtcagtctcaggtgactgtgacacactcatttcctggaggtgagttttaagaaaggataaagacacagaaagttctaaggtcagaaagatggctcatcaggggatccttgtcacacaatctgatgatccgagtttaatccctggaaggagaaaactgactgcagagagtcaccctctgaactttggcacatgcaccatggtatatgtgcactaattcacataatacacacacacacacacacacacacacacacacacagtaataagtaaaacagtcaaaaataaaataaaataaattaccaatagagaagcactcacaagctcagatttgaaaaacacatgtgaatatttcagaccaagatagacactatacccaacaaatatgaaaaattatgcatgagctattataaacaatccatcacttttcacatgacttgaatagaattatttgagagatcactgaaaaggtatcaagtgggtagttttcaaattaaatagtaataggaaattttgaacaaaacaagaaaatagaattaagagataaatatggccaagaaccactagaaatattatctaatgaaattttcatacagttcaaagaaattctaataaaaatgtgaataatgggttggttatggttaaatttaatgaaatggaaagttagataagatggtgtagaaaggaaaggacaatgtaaactatcaaattggaaagtaaattgagatatgaaagaaatacctaataggaatcccagaagaagagggtgaagaaaagccaaactccaacagatgacaactggtaagaattttctagaactgaggaaagttatgagttttcagccaggaaaaataatgatgcaaatatgtctatacgaatatttattgaagtttctgctatggtcatatcttacagtattcagtacgtattcaggccatgtttcttcacaagagtgtctgtattactgtctcctctgctctctgatttctcatgaatgattctatgcccgatgttcaataacttaagatgccaagtgatcaaaatagtcaaactctgactttttgagacaagagagaaatacacttttaagccagtaactaggaatattttctttcataatttatttcacttctctattcataataattgatgtattttactaattaggttagaaatatagtctttaaacacttatgttttatatatgtaccaataatattaatatatttaatacccaactcagtgattttccttatttgggaggggggttcaagacagggtttctctgtgtagaccaggctggcctcaaactcagaaatctgcctgcctctgcctcccaagtgctgggattaaaggcgtgggccaccaccgcccagccttcagtgattttttaatgttccctcaagttgtgattagtaattgccactgtgtaggaagacaaattcagctgttaattcaagactgctgaacctttgccatgttctctttgcttaagggattatgaagttatttcaatgagtaaaacaaaatttggatttctttcttcaaattccctggagttgtctgctgaaggtttttgcttcaaagtatgatgtttaacaggtatattgtgtggtgtactagctagcatgcaccctgagaggttaattttgtaactatctattgccaaattatattaaactttaatatatcttactcatcaatctgacattcaaggaggtcttgaagggattggcctcttgatctgcttgacatcatgtgatgactcaaaagccaggggcataatgacctggcaagaatcacgtgtagggcttcgatgccactgaagtcctaatcacacataggaaacatgctgcaagttgtcaggattcttggctggggtgtcactacaacacttaggatttctatgtatctgttcatgttcctcaaagtatggtagcaagcttctaaggcatgggcagggataggaggaggctggctttgttgtctttgtgtaccagcctaagtctctcaaagctacttttcctcattctatttactataagtgaatccctggaatgggaattcaaagactggggaatcctagaacatatagacactgtagccactatatatgaactttctaaaataagcagagtcagccatagtcaagtagataccatcaggagcttggaagacaggatggactatgctttgggtacacagctttggtaaatttcagcaccagccccgtggataaacatgagcacttgttttgtctagtcttatgaagttttacaaccagagtgaaagggcagatccagtactcaaaaagggtttttttttttttttttttttccccttggaacccccagaaattatggttaattcctttttctgacaccagggaactgttcagattttatgtgcaaaggtgttagccagaaaagcaaaaaaaaaaaaaaaaaaaaaaaaaaaaaaaagatgagaggtaatatggaccagaacagggctaggactgtgatactcaatgtaaaaacttaagtgatttatcatagtggtaagaggtcaaagggtaaaggaaaggaagtgatggattgctttagagatgatgcaggtagaagaagtgctagacttggataagagacagactagataggacagagaaaaggatagaaaggaagcgggcaacattatctttagactactttctgctacttagtggcatttttggtctttgctgttagaatatataatttcttctttccctttcttctttgtgtatgactacttaacaaactgtgaccaacagcaaacaaccagcaaccaacaaccccacacacacttcttggggctctagtatttatataacttctaaaatgtcttcagaattcccacatcacacagtcacagaaactgagcgacagaaaggcttaattgggggaaagaaaatcatttcagagcccttccactaactctcattttcctattccttctggcctcctgaaaccatggccaaagatagaggaattttaaatgcagcaacatcaacattgctgctttagctggaatacaggcacatatttagtacacacttttaattccaaaccttacccaaacaggtaaggttagtttgtaaaaggaagaagccatgtttgaaagtgatgaattagaaaaagatttgatagatatgcctaactctcactggaaaagacaggaaagggaggttatttaagagtagtctaggaagagttagtcagttgtcagctgaactcagttcagtcagttggcataggaggcagtgcagtggagttgagttcagttttgttcagtttgtgcagtagaggctattgaagccagagaataagaaggaaccagaagattatagcaaattgccaaaattagcttgaggccaagcagagtagggagaagctgagagaagccagatttaatcagtcagtatggagaggagtttgagccggaacagctgagttgaaccagctatccagagttcagaaataactagaaagggtgagcttattcaacagtaagcctctgaggcaaaaaattacatcaggtgaataaaagttacttttacaactaaacaaagaaaactcactggattgtgttccattaaagagagggtggagaaagaagaacccacagagtagctaaaggcaagctataatatcaagcttaagatttttttatggctattttcatatctagccatctcttgcttatatccactaaggtatgctatttagtaggccaaatttcacttaatactcattgaatatctgtatttttgaacagactataaactgaggaagacaacatctgctctgttaattgctcttctctcaatatagtgcattacataggttcagagtggacaaatatatggggtatgtaaaaactgaaaagcacaatacataggaaagaccaccttctcaacctgaagggaagtctctttgaattccaattgtgcaacagacaataatgcatcagaaatctatctccatctggctctggcttgattggttaggagagaccagtacaatgagaaagctaagaaatcatgctgatgtttgaatacatatgcacaaattataaattaccttgaagcttgctagaagcttcatttcaaaggcctatgaaacaatacttgcaacttcttaatgagcttttctttcaaacctctgatgtctgacttttcccaataaactcagcaagtcagaaaaatcaaacaatgaaacccaaaagctaaaactagccatgggaagtgaagtaaatatttatgaatggcttccataagcatgatatatgtttatatttttagtatgttttgatttgtgtatcctaccacctcaagatataagctagcagctgggagctttccttatctgggaaatacttggtattgtactttattgtatttaatgactgtcaagagttcacaccacacacacatacacacacacacacacacacacacacacacacacacacagaccagtggagttatgtgggtaattcagcaagcattcttatctaaaatgccatgttttttcccttggctgctgtatcagtagactgaaagcctcagccccagctgtccggagaggccatctataaaagtgcaggtgttcagcattagcaaacagttcttattatatggatcaacttttggcagctagtaacgatgtttcctgagattgaaaaatgattttctaccttaaacagtggtttcccattactggaatgctgaatgaaaccccctcccaaattcttctcatcaagtagtactgagactgtttttgttagttgtatacatttcatgatttgtatattttatagtagaatgtaaggctttcttttaactgttgtggttaggtttaggtcctttgccaaatgaagcagactatgaagaattaggaagtgtaatgcatcctggggtctgttcctggtaaggaggcctagtgtctggctggcagccaagggaggacctggggctagagaggttttcaaggatttacagtactggggcatttttgtgttctagtattggagacttggtttgcaccatcagatttttaaaaatatcctcttatccccatctgcaagaacttcaaatacctttgaaatatgtgcttccccttatctgaaagtcacaggaaggtagaatttgaggcttctgtgtaaagtgattgctgtgacatcgaggcatcctatgtcctcatgtctgcatttctcatagatgtacccatggattatgccacctgttatatacttagttctttaatttgttttgtgtgtgtctgtttcttgagacagggattcattaggtagtcaagcctggcctgacacttgccatcttcctgccaccatgtcccgattacagacatgggctgcctgactggcttggtttgttcatttctaggtcaaaaccacaaggctcaaagtggaaggctcggagcagagaagctttcctttctgaacattgtggatggagcagagcttatttgcagtgggctaatgaaatttgcttgaaatatttgagttacttgttgtttgcttaggagtttgctgagccaataggaaggctagttcaaatgacaggaggatgtattgacataggagtggttgggtagatggctagaactgaatccaactggagtgaggagtgagactggctctgttaaaataatcttcacactttcatgacacatcaccacctttggggaacccttagtcccctcccccactggtattttagaacctctacaaggtggataattccgggtattggggaaagccaaacaaaccaatgtcaagatgtgacttaagccctagtttagcaggcttaaattacagctgtggaaggaaagttcacgtgctccatgtgcgacagactcccccttagtctctccccctcaggtcttcgcaggagagtgcatttcaggtttttgttcagcatatgaaaggctcagtttcaaaggctgaggttttcacattcatgtcaatatcacaggttgaaatgtgacactggtacctggctgcatagtttctttaaacctgagccagtaatactgtgaaacattaggggaggccctctttcatctcacactttaaagtgcagtttgttgatgtaacccagtttccagtctgcagaggtcatcccataatgtagagcaatgatgggaagcccatcagtcctgtttgatgttcctgtcccttcctcagggttttacctccactttgttttgtaaagtaagtttggtaatagtgatattttgtctttccaacatgtgatgatatggattcgcctgacactcatcaactagctttttagacactgtactttcttttgtgaggatttttctgaagatacaattatgaaggtgataattgaaataaatacatcttatatcaaggtctttggataatgttcatcttaagagtaagcaggctaatactgagaagctaaaccctgtttcctagacctctgcaacctcacattcagcaactgatatgaaaccagtatggctgctaccttatgactgggtgggttcaaactgaggataaagagaaatgtatggggcaagtgtgggcaaggcaatggtgtggtaaaatgcctacaacctgtctcagggtccttgatagaaaacatgaaattaaataaagggcctgcgcattttgtttgtccctgttctaaattaagacataaaaacaaggatgcattggaactaaagccttctgttaggataatgaaaaggccaaagttgtctgcacattgggtagtgaataaaaatgaaggaaagtgaatttagggcactggtgactttcagaaatatacgatgcaatgttttcattcatgtgaatagatcgatcttgttttcaatagctgaattttcttttctctttgttttgaaatagccctcactgtccctgtgctcatatacagctgggattaaaatgaaggctttgcttaggttctctccagcagctacatgctgtgataatctcctgatatctttgtgggctggtccctttggaaaaggagaaacaaataataaaagaggacccaagacctaaattataaggttcttggtgaccccagaagttctgttattccatatcttatggcttcctagcttcctccattttgatcggtgctgtgtccccaccaaactccattctgtagacatttacctcaccatcaatggtggtagtggatgggaactttgctaatacttctggatatatcatgggtacgccttccatattaatataacttgtttccaagaggagttaaaatggtgttgatttcccaccattgtcaagatgaggcttcccaggataggctctttaaacatcatctctccaccattgcctcagctgccccccttttacagttacatacattccctggctaatatttttcccaagaagtagaaacatttaggaacactaggaatgacagtgtgaagttctaggcttttgagcgacctttggtatgtgctagtgaagagaaggtaccacctgagctattttcatctcatatcttatgcctctttcaacaaaactagtttgtctcttgtgtttcacatttaaaaaaacagttaaagagctcaaaggatgcctaaaccttcttatagtccacagagaaattagactttttttcttttttcatatcaaaatgtcaaatctgacagtctatgccagcatccttactaaggtttgcaaaacagaaacatctgtctttctggaaatactgggaagcaaggcgactttcacccttcctgccagccccctcccacaggaaagaggctatatccgattgcatgattggaaaaagtaagtggtctgtctcccacccccaccttctcccacacctctgtttgactcttttcaaccagcttgctggcaggctgcagccaaggcatgttctccttgtccttctgccatgggaacacctacagttggaacagcatagagagatcagaaggctgactgtcacctctggtactaaacatataccctgatcaaactttactggtaatagagttgaccagttgatctccttctgactcctacttgtcacctgagtttcacttccccaaagaactgtgcattttcttcctacagagagacattgcctttccactgatacttagttcagtacagatgcctgacagagtacatattggctggattaagatgaggaaagataggtgccagacacagtagtctggcagagattccctgccatttcagtgcagatgcccacatccagaggtagacctcagtcactacagactctgaaccctgcccctaccatggagcagggtacaagccaatctttcaatcagttaacctgagaattttataattccatgtggggctcagaccctgcatctgagttcctgttatggacacccagctgccgcctttcatcttttttttagcactacattttctggtgtttgaaactgaactctggcttccatttcccgccttactcctatcaaccacaatgagatgtttgcaaagtcgggttttttcttctttgtactctttgtgatctttagtgtctttctatttctcatatataatagagtagcaagtgctagcatttccttgctaacacaaaattctaattctctgccaccacctcacattatgttacaccggaagcttttcctagcctccttggttgtcttcctgtctacttttagaaagtagccaaactcatagaaaagtaataggagagcccgtgcctcctgtgcttaaaccttgtcaacactggacctacatcactggaacagccaaaatgcccttcttcctgtgtcctgtgaagcaaaacaggctgagatcttctttgcacagcctaggcctcttgtcactgttgattttatgattttattattatctaactattcaagttgtttttttcctccacctttgcattttggtcacatcctttatggttatctatagttcgatattgtttaaggttttatgtcacttatgtctctcagtccctctctctctctctctctctctatgtatatatatacatatatatatacatatatatataaacaaataaaaggtcttgtattccatagtatctgcagcttgaatgcatcatttaagccagcccaaggcaaggcaaactgaatggtgtttagaaatcagacattcttagcagcagagtaattgcacagagcaaatcacaaatccccatatcttggggagatgccccagaacatacttccaggctacatcagggcagaactgggggcagctgagaacttaagcctttatcaaccgcacaggacatgtcagctaagaggaaaactgatggtagcaggccctttcctgttctttattttactggcagctgaaaaagtaaccaaaagtctatagaatagatccttgtgagacctaggcactgggtggaaaacaattggtatgaggaagtatatcagacttcctatgtctctggcagggtggtgagctgcagtcaccacttttaatgtcttcaagaatgtgacttgtatgtcactgcagacagcacatcacatcactgctctgactgcttctcttgctctagacatagcatagatttgctccaaccatgggcagaacgcagttgtacaacagtgagtaaaacccccactaaatccaccttctgaacctggctcaattgtgtttccagcttacatgtagaaggacacagagacacatggtgatgtgatctcctgctcagttttatgcagctacaaaatagaatcctgactgtaaacctaagtaattggtataagaacttagtacactgtgtataaacttgcatctgttccccacttcacatgttcctttaaaacagcatctttctttgtagtatatcattttaactttataacataacattttcctcacatatcaattactctttcacaagctttgtagaatgctaatatttatttattatacagctatatactgatttgaatgtttatactattgttacaaatagaatttattgtgatgtttaaattgtttaaaaataacttttagtgcgccttttgtaaatagcacatgcttgtgagctgaatgggtcccatgcaaaaggtatgtttaatttatagctactgatatttatgaacaagatctcatttggaagtagtctttgttagatacagctgagtgaatagaagatcatgctaaattgggctggccctaaatccagtgaatgaatagataacagaaaatagttatgcacagaaggaagaagtctatgtgaggatggagctggaatgggggtgaggcatgtgaccaccaggtgctagcaacaagcaaggaaaggcccctccccagagccttcagattctagaagctggttcctcctgagttcttactttctgaactgtggtctccataactatgacagacacaattctgttgttttaagccactggatttgcagaaatttgttacactggcctgtctctccctctctctacctctctctctccctctctctgtctctttgtctctctctgtctcttcctctctctgactctgtttctgtctctctctgtctctctctgtctctctttgtctctctgtctctctgtgtgtgtgtgtgtgtgtctctctgttcttcagtagccccccattccctgtgtttttcttgtgtaggttgggtgtttcctatttctgacacattctgtcagattttctctgattccttaccttttctgtccttcaattagatgtcactttcaaacatgcccctttcatctataaactaacctcaccttcactgatagtgataaaagacatgtactaaggacatgtctgcattccagccagatcatatctttggatcatgaacagaacagccatgttgctggatgccgctacacaaattttcagttatttaaaaagaagtcatatagtagtgattttaaaatgctaagaccaaatatgaagagtctgttgctatttccttattctatattcagaataaatgtgctattattggtaacttattgttgcatagcaaattgttctgaaatgcagtagcttgaaatgacagatatttattatcttagctggtgtattagatatctgaataagcttagttgggtgcttgtaactcaaagtctttaggaagaatagcaatggataaggctgtcttctcttttgaaggctgcagtgtgggggtgggttctgtgctaataagggtccactttctcacaacattttgaatggagggcatcagttcctcaaaaactcccaggataggggcagttctcaatgccttgcctcgtagacctctcagtgtgcctgactataagcagtaggaatccttagaggaagagggagagtatgacagaagataagaggacatcttcagtaagatatttttttggtagaacacttctctgtgacatttgtgtttattagaaggggctaactcaattgaatccagattccatagtagacatagagttgcaaatgactagaagctagtgtggagactagccacatgttgggtttagtcttctgctcgtaacactttacaaacaccattctttatatgtcatcctgttttttccttaagattactcttcctacttctagatgccccattatgtcttttcttgaggaaaccaaatgcttccttgaaatttcagtcaggaaatagtgttcagtgttttattcttccttgttttggtatactatttcttcttgacttttctgcaaccatcttctccatttagatttgtatttcatcagtattttttcaataaacaagaactacattgtatatccttaatatcctggagttgtgtgaccatcatagctgccacatgcaggacagacttgggcatttggcttctatttcctaacctactgatgttccaagatctatctatctctctctctctctctctctctctctctctctcttcctctctctcatagaaagaacaacttgattctattcagatttcttagttctctagtttaattattaaatacatgaaaaaatacaccattggtactaactgtgtctatattcactttccaaaatacactctttacttctaatatcaaatctctcctatacactgtattttctaccctggtttccttttttagtctgtagattcaaatagaatatagggagatgttagggaatggatagatcttggttcagttccattttggaattacagtctatcttcttaaaattttagtattggctttaattcacatttctctttttttccccctacatcttgtgaatatttcaataaaaaatttgaggcatctcattggtgaatttttcacaatgttctttagaaaaaaatgtataaatacaatctgtatactgtggagctatatagaatctctgaaaacagctttgattatttcacttctgcctttaaaatcccttcggtgttctttgtatcaacttactgtggaatatttgaacttcaaaatgtcatgtctgattcaatccccagcatgacagacaaaaaagaaaatgtaacacttcaacaataatttcatcctgcatctgtataagcctgcagattcattctttacacacttccaacgttctgtgtgctgattggtggctttttaccactcgccagtctttttctctcagtttgtcctaaaaatcccttttcagctctttagacttaactgcggtttcatctttttcagaaatagcaaatttaatcattccaccctaaaaattctgctaggtaccacacaggggcttctcttaatgtccgtatcacttttacttggctagcttctagcttacttctctaccaggcacaatgactgattcatattagttcatttcaaaatgttcattgatataaagaaaacctaaatatatatttccttttgttcctagtaaaatcaaagcatagatctaagtctctcttctctctagttcctgtgatctcaaggatttataagccaaatcttatgcttctttttaaagatttattctatttttatatgtgtgtatgtatatgtctgtatgggtatatgcatgtgattgcaggtgcctgtatagcctgaagtagtaagatgctctcagagttggaattataggtgcttttgaagtgctatacctggatgcttggaactcaaccaggatcctctgctagatccttctgtagtcttaacttttgggttgtctctccctccctgtgtttatttacccctcagaaaaggctcttatcttatggaaaatgataactgtctttctaactccattattcattgtctccactctacattaaagatctgttagcctttcatttaagatcaatgatttaggactcagcttgctcatgtatgcaaaaggctgattttagtggccctatttccttttctctttttctccgtttttatccattcttttcaggattgttaaggttacttttgagtttcagggagccttactactggctcaggcaagcagtatagttcaaaggaaaccacttctgtgggtgtctcactttataagtgtgggaaaaacatttacctggttaactaggttgtttcttatgaaatctactcactaagtagaagaaaagtagtgtttacccttccttgattgctaaaattagtttctttataaatgttttagttgttgctaacaggactgtagacttatataggacacagtagcaagtgtatagatactgttcaagtaaagagattacttttttgctactagagaccaatagttaaacaataaaaacaatcttatttaaaaagatagcttgaacacaagaaaaaaattgtaagaatttgttttatagaatatactaattcgttttgtaatgaggtatcactgttataccagcattgaacaatattgacccagtttttcaaagtttgatgttcaactaagatgctaataacttcagcatcaggaagatggataattcaaattaagcagtgcaaagcagtctttgactgttgtcatttatgagaagaaaaagtcaaagaattcaaacaacaaaaaaagtgtttctaattgcagtgcagcccacaagcttacacatcctataatgagaacgctccttagctgccaagatctgctattcaatctgcctggtcgttgatttcatcattacattttgatgtgtccttgacaagctttagcatacaaaaactcaacaccttctcctaagcccctggcataccagaacatcatggataacaaaggaaggcctgcatttggctttgtcttattagcatagatggattgtttataaacagtgactgtgaagggctcagagacatcaaacttcccaagtgttatgtgctattcagatgtggcttctagttttcagctcctgcacataaagaccttaaactttgaaaactgcccctggggagtgtcaaactgtggctaacaactctctcttttttttcttctgtcaattgtgatgaattgttctaacactttgggaccatggcctgtggttcatcatccttagatgtcagctgagctctttggacattctctctcccctctaacttattttcacagattgactcctgtacccagattcaagtagagaaagtttcttaaattaggagacattggatattgttatcaacgttgagatatagtgctaatgtaagcaaaacttaagacaaatgtaattaaaataatcaatgccataaacacatttgcaaagataaccccgccccaacctctgttcattagtgttagtgcaatacaactattttggctaagtttcatgtgaaagctcagaacctgctcctgcagagcttatcatccttagctttgctactttccacttcaaagctgggttgttttgtactctgagtgaagtattagtatgcagacttttgtgatgaacccgaatttagggttttacaaagataataaaatgttcgattcagtatgtcccccagccccagggcaggtgattagccttgccttggattatcaaaatattatacctctgactatcattggatagattctgtggagaatgggcaccagtgataaaaccataaaggtttaatttggaacattcataaaaatatgtgtcaagagatggatttcatcaactgtgtttaatgacaacaataaactttttgaaatgtccagaggagaatagttttaaatccacatttatatatatatatatatatatatatttgatttcttctattctcaagtgccatactactgttattttttgtggtaggctacagcagctttctgtttcattatttttgtcaacaatatattgcctttataaaaacaaatggttaacagatattagaggggaaggagaatggagagacataagagggataagagagttgacttttgttgaagaccttagacttccttagtatctgtgccaatcttatgtcacatgccaaaataatgcttactctctcagcgtgttttttttctgtccttcctgtctctctcccacctccccctcctctatttctgattcaagatgtctgagtgtctacatctgatgccaatacacagaaactttcagaaaagttgtgcactatcaaggggtattgcaaagccttcagcagttggtgaataagtgattaaaacaatttaggaacatagtaggaataattcgtgtggaaacaagaaatcaatacccttactagctacaagtggcccatttgcatttgagattagctgcttttcctatgttagtttcccttcttttaagaatgtaattaaatcaactatcctaagaccttgccactgcctcctgtgtaaccagttccagctgtgaaactacttccccagcaatagttgctatcatttttgttgttgttgttggattggcttgacctttcttgcaatctactcctatctcaaagtaagttagatgttaacttctagactgaaatccaatttggccgctaaaacgaggcatgcatgtgcactgaaagtccagtttcatttacacagttctcaaaacgatagaagtctaaaggaaggaaggaatgataccaccccaagcaccatggctccaatcccactacttggtgtgttcctgtggctgagcccccttccaggagaggtgctcagctggggttttcttggcttggagttactttgctgcagttaacatttccttcacacatcattaggtgaagccttggttgcagagatgcactgctcatgtcatagcaaaagtatgcttcatgcacctgcagtttgaagtttttgttgagggaataggctgaggtgaacaaagagcttgagactatttacatttttgggatccacctgctgtggtatatttttgttggacagaataactggaggtgtgtttatagtttcagggaaagaatacattaggggttacatggttttaatgctatatttttccttaaagccataaatcaaattttcatagaaacaattacacacatataactgtcacagtactgtagaagaatatatgtaaatatcatattttgttaactttttttaagcgaggaaagaataatttcccgtttgttgctggtccaggcataatttatcttgctagtagtatgtccgtagcatgtctgtgctacttattattgacaatgatgtcagagtaaaaactatctaccatatttataaaatcggttactaggttctgttttaaataccagggggctgtttagctaggttctgttacattgtgttaattatgccttgaaacagatttaataatctgataaagatcttaaagataaatctttcactgaagtacttgttgttcttccatgacagagctaagatgaaaacctcagtctttggacaccaaattcagttatatactgagtaaggacatccctaatgaaaatattaatgtttcaaaataatagccaagtaatggtcccatttatagcagcagtcaagtcttcattgtaatcatacctgactatctgcggcttctatatatccatgtttatggaatttctttggcttatctccaatattcaaatgttgacatgcacatttgaactatgatctgtatattaagaggtctcattttactgaggaaaaatatgatagtcattttttttgtaatttccccatctgttgtgttgaacctttccatcatctcttgtctaatatcacattgaatgacttcataatctttaatgatagagcaactagaactcattccttagagtggatatctaggcagcctacctctgacttatcttcgtttcttccctcttgggacttatattcttttatgtgatgtcacagatgtgcaatactgacagtgctcttttcctgtttccctggttgcatgccagtgatgaaagaggtcctggcataagacagtgtagtctttcatgattcttgtgactttaggaggagaattacttttattggggcatattttaaataattttattctcctttgtgtgaagcacactgttcacagggaagttgtttggccttctattggcaactcccactagaaaagtccatattctacactgtgtaaagtaacttaatgtgtggcctattgattttggcctagtcttgtgggttttttgcctatgttttgtttgcttcataatttaagacaataaaacaacagaaaatgtcttctctcccattgagggctctaagaactgaggagatatatctacgttggcacatatctcattcctggaaagactactgtatttgtttttaagttctgtttgaatggctattttaattgtggatctctcttgggaatgtgtagctaagaaccaaggccagtctggatgtttctagatgtctttatgaatcaagaaacataccaagcagtagctctttgatgttaaagttagctatactatcaaagaacagttgaaaaataattgattaacttaaaaacagttatgtattatgtagcctttctggacaaggaattttggatagcctttgctagagagtctagctcagggtttctcattaagttacatttagattttacctgtgatttagtcctgaagactgttcttagcagagatttgacttccaagataaaaatctcacttacattgttgatatacatatagatcctggctgcaagtggaaggtctcagctgctctccatgtgtacctatgatcatgactgcttgagtgccagactgacatgacattattttcttcccaagaggagggagggatctaagagacaagtcaaaagttacatgcactgtaacctcagctcaaagttacccttctgtcacttctgtactcatccccgagactcaaccaacagttccaattcagtataaaaatgggagtctacaaaaagatacaagaacagcaaagataccaagtatcaggtaatcaccagatacctgatcagaaaggtatcagaaagggcctatcaccaaagtgggacttcaggtttctgaaatgtacttgaaacgaacacacactaataatagccccatctactgtgcttgtatgtagccatagtttctacaaatgactaagagcatcctaaatcacttgcctctgattccattgactctctggctaacttttcctcttcttagacagttccttatatgaactaggaaggtattataatggtgtgaggtagtggtagaggcagcttcccttaaagaagtttgtgtgtattagtcctgaagtgatattcatcattactgttctcttttcattggctcaaatttagtcatgagtctccacctaatttcttggagtgaggaatgtagtccataattaggtagtttgtaactaagaaagaagggcagggacattttgtaaacaaccagatacatttttcattgggtgatattacaaatgtaacagcaacaacaacacacgcacacacagaaggtggggggcatgattcacaacacagtgcacacctgcagccttccactccattgcttgctaaccgtctcagcatctcaactttcctctagtatcaaccttttcttgctgtaagtacaacctggctgtcctctcatgatactgcctctcctacagggctgcatattatagccctgtttgtcccaccctgctgatcacaggagaagaagaccagatagaaactcttgttctgtcatctgctgccaaattgtctttcttcctatcttttatgagcatgacatcagtgttttctaaccttagcattccatgttgccatctgttggcctcctggcctttcttatttaatgatgatgccagcatttcagtatttgtctcgttcttgacttcattttcttttcttctcagtaatttccacatctaagcagataattccaacgatgcagaagctctcccatgtctagtctctttggtgctaaggatcatctctcctaccacatgttggcaactgtcagaagaatcttgggtattgctaaccatcaattctttattcctcttcacaaatcctgacgtgatggacacagcccactcttgctatcacttcctctgtctctaccccactcctcctggttgtacctctgactatgctctcatctcctacctgctgtaccagtttcaactgttcattattctcctgggttgctcactttccagcctatatgtctggactcactatcagccactaggaccattttcactcttcatgtccccttctccgctctctttttatcacttgtcttgcatacttctaggtctggttagaactaactatgtagttatgccatacctttcttttgaagctgatatgggaaaacatccattatgtgcttattaccttccgctacaaggtggttacttataaaagccacctctttactgtttctctagatcctatttctgaggatttggttcttgtcattttccctttatttctagtacaggcaattttatcctttgcccctactggcaaacatgctccaatattacccatctatcttcaaacaaacaaacaaacaaacaaacaaataaatccaaagtctcactaacacatcttcaagaaccacttcacttcctgcctcatttttaaagacaaattctttgaaaaattatcaccctcttttctctctttcccttgttttcctcaggaattgagatttgacccaccaaactctctcagtatgtggttattctttccagtacacagcctctcagtagtatccagggccaaagctctgtgcttgaatttcttttctctttgttattatctttatttttattctttgacaataccatatttgtattagtgaatgttggttggctttattccctgttacctgctctcatctccctcattaatccaataaaacccctcttcccaactaaaaatccctctgactttggagagagggggnnnnnnnnnnnnnnnnnnnngagaggagagggaggggagaggagagggaggggagaggggagaggacagggaggggagagtcctcagtttactcatgaacatgagttgatgggttgtggcttatttcctagagcacaggaaacttgccagcgggtgtaccactgaagaatatgacacctccttccccagcagccattaactgaccttagaacctcagctagaggtgggacctcatgagtgcctctcccatgcatgatggagtgttgcccatctcagttttgtaccagtggtcatagctacagtaagttcatgagtgcaaaagctgtcatgtccagaagacactgtttgaccattctctctatgctctggcttttatattccttttgtctgctatgctactgatattctctgaatcttggcaggagctggtgtgacatagatgcatgggtagggctgagcattcaacagtgaatgacaatttgagacatttcaataataattcagaatccaagggagaatgccataaagcagtcattttgtgtttgatacatagaaaactggtaaactttagggttttgagtgacattagcaagagcatccagtggcaacatactagtataccagtgtaactctattctgtaaagaataaccagtctccttctgaaaggtaaataaaaagctaaccagtcatactactttgatgaattgtttattaagggtaatttggaaaaaaatcacttatcattttttattgtagaatttacatattttagaaaatgaaaaatttgagggaaaaataaaacatctagacaaatcatctagacaaattatttctgaggtttaattgaaattctctttctgttgtcaacccacatcttcatatcaattgtcaattagcttcttttctgactatgtattacaaattgtgtgtttatatatgtgtgtttgaatatgtgtttatgtgtgtgtttgtgtatgtgtgtttgttgtgtgcatgtatgcatttgagtgtgtatttctttgtgtgtgtgtttctgtgtttgggtggttgtgtgtatttgtatgtaattattctcctgaccccaagtctttctctgagttcttctgtacgtaggactttctcttgtatgtatacatatcaggcctatgagcattatcctctttctactgctctccccatgaagagtgttcttaaatttcaccaagtccctggcataagaaacataacggatggaaccttattctttaaagtgtgatccaaagtccaagaatattggcatcttctgttagtttgctagaaatccaaaaccttcattctgaaatgtggtttgaattgtgtctaccaaaattcctatgctgaatcccagaagactacatcatacagctttagttggagattgaaaactttcagaggtaacctaggaggattagttcattaggataagcccaatccatttctaaaggcaaagtttcaacagagacacacatagaaggagggcagctgtctataagccctcggatgaaatgcagaaaaatcttttgaatcttcatctctagtctccgaaactgttgttataatttctttctttaagccacttttatcttttacaacactgctatagcagctgtggcaaagttacagagctccagagggctgtgggtcttaatctgcagtttaagaacaactccaggtgtgtttcatgtttcttgacatttggaaacttggtgttaaaatatttccaaaaaaaaagaaagaaagttttgctcaattagtcatcagtaataaccagggtttaccgtgttatctctcagcctggatccctgttgcaatttctgcagaacactttccttcaatgtggacgttagggcgcagctggtgcttttgaagtagaaacgtttggagatgagtcccagtatcagcaagcttccaaaaagactaactaggcatccagggatgaaaactactgacttaagtaactggaaagttctatgctttgtttgctgtgggtgtagtgactctgagctttaaccttgactgcctgctctcctatgtttgttcctatccttagatggtttccttcaaggtcacaaaactgccactagaagcaatcacggctgcatgcttctccagtcacctccaggggaaatggaaggagctttggtttagtaggccagtatttgcttaatacacttcttactcaggatctaggcctgtgcaccactaagtgttgagaagtttgtgcctggtttgcatgctcatttataaatcaggaaagccaggcatcctttaatgctctcagatcaattgagtcccacctctgaaaccacagagagcaactccctttgacactgctgggcaagagggggtggattatttactctcctgacttctaattcagtgtatcttgaaacttcatattttttttttgtagaaaataagaaactattgaaaaggaagacaataaagagaaggaaatgaatcaaggaaggaaggaagaagggagagaaggaaatgaataaggaaagaaggagaagccatgtgtggagggatgctccattgtattatactggcaaggaagaacccaaggcaatgacctctcagctgagctgaagaggaagaggggaaatttcccggggaaagcttatgcacaggaatgataagctcagagactctatgtggataaatgtagcatttcgtgttgtaggaagcccactgtggctaaaggaacagatgcctcagaaaatggagaggtgattaagtatagagtactgtaagctggagaccaacaaaaatttctataaggtttctattcagggtttttaatttaaaaaaaattatgtttatgagtgtttagtcttcagatagtgcatgtggtatctctggaggccagaagagactattggatccttggggactatagttacaaatgcttctgaactgccatgtggttgcttagatttgaacccaggtcttctggaaaacaatgagtactcttagcttctaagccatcaggtttctttttaaaaggcaaattctaaggtcgagggcactagtctagtccatatagtacttccagcataaccctaaaggcccaagttcagtcttcactattcacttaggaggactaccagtgctgctaggtgctttcagtttcctcactggggagcaaaagacagggagatgcctactggagagccgctaaagtgagcagtaagcaaatgctggaccttgtctcaaaaaaccaaagtcgacatacctccaaatgaacaacaccagggtatacacacacacacacacacacacacggggggggggggggaagaggcagggatggagagagagtagggaggagaagaatagagaagagagagagagagaaaaaaactctgagtgatagatagttaagaaataaataaggtgaagaatgactggaagtagagaacaattaacagggtaaatggtggtcttggtaaaagatgattcatctgaagcaagagtatcataaacacaaaggaaagcaggctggttcgaaccctctatggagatgatctgtgggacttctggattcttttctcaaccacagaagtggaacacacatttctgacttaaccttatattttgactttcatacaattataatttgatggaaagaaattctatgccatttcacaagtatcattgtaaatttctatctcttcattatgtgcctattgtatttaatcaatagtctcctagctaacagtctaaggaatgtgtacatgtacttttagtcaatagtttactagtgaactctctgaggaacatgtgtatgtctaggatgatcaaaaagagaattcaataaaggaaattacaattactggccagacagacagaagaggaagagtaacaattaaaaccacaaaccccaagaatggataaaccagcaaaagcaatgtttcaagaaggaagggtttgtcaaggactgtggcctctaaggagcaatcaagtaggagacatggagaaaagtagtggagcttcaagatggcagagagacagggaaggaggggaggaggcaggggatggggcagtgagactcttggggactggaagtaatcaaaatgcgttatatactatacgtgtatgaagatgtcacagggaatcccattcttgtgtatggtcaatagatcctaataatgaatactttattaagatactggaatgaaagaaatattttgagtagaatgtgaacctagctatcccccccacttcccccttgggtacacctgctacttcttcagctgtcagacgtggggtgtgtgactcctttcagctacttggagctgcagtctccacctgcacagcttactgcaggtgggatccagagctgctcagaagttggcaacctcagataacagatgccatgcatgagcaaggccatttgggagctggccactagggaactgtcactggcagtgggctggaccagtgtttgaatgtgaggagctagatatgagctgaaccatgtgggaattgagtgcttgcaagtgagcctctctagagtcaggctgctccagagccaagtatgttaggatggtcactgcctgaaaccgtctcccttcctctcttgcctcactgagtttacagattagcctgtctacatgctgttatcgcaactattataggtatcctacctccactgttctcctgactctgtccacactgccagctctagtcagtgctgctcttctgtctgtggagtgttcaagatggctataactagcatgtggataatctggctgtcagactgatttcttttttgctaaggcaataagaaaaaaaatcaaacagtatctaattatgaggtcaaatgaaatcatccatgcactttcttacttataggaaaatgagtattgaaaatagtttacaatagtagtgagttgagcaatatttaatacctgctccatgctcacagaggggcaattgtcctttatctgttccataacagagaaagagtattgttttgaatatcaataaagttgataactataaaatcaatgtactctatagcaatttgtctagtatcatttctaatattccttattaacacaaagttgagactataacattcttgacttaaatttttattctatagaatacaaacagtatatcctggtccctgtcttagtcaatgttctattactataaagagacaccatgactatgacaactcttatttaaaaaaccttcaactggggattgcttatagttgagagatttagtctgttatagcacaaagcatggtatcctgcggggacacatgatgctggagagttcttcatccggaccctgcaggcaacaggaagagagatacactaggcctagtttgaacattaaaaagcccaccccttctgacagacttcctccaagaccacacctgctttaaccagaccatagctctaaatagtgtccctccccaggcattcaattatatgagcctatgggggagcattcttattcaaactacttcagtccctttgtgttgtgccataaaataccaaagactagttaaccttggaaaggaataagaactgattccttgagaatccaattccaaggatcttgcactggtgaaggctttctttatgtgccatctcagggcagggatgggaactcaagtcgttgaggaatacacaggcaagagaagcctcattcaaatcataccatcatcctaaaaggatttatagaatcatgtgtaaatagttgatatgctgactaagcttttctatagcttagaggtttagggcttaactatgagctttaattgggtcaaattcataatttctctctctctctctctctctctctctctctctctctctctctctnnnnnnnnnnnnnnnnnnnntctctctctcttttcgagaaagggtttctctgtgtagccctggccgtcctggaactcactttgtagaccagactggccttgaatttagaaatctgcctgcctctgcctcccaagtgctgggattaaaggtgtgtgccaccaccgcctggccataattgctttttaacttccacttgagatcttcactggaaggaaattatatctggtattgtaaagctggttttgctcatgcatcccagactttggaactgaggaaggtagcagccaataaacactaacaactttaagacagcaaaaaccccagggaaagtagagtctagtaaggcaaaagaccctcagagataactgctacattttagccatgtcaccaagaaagttggaatcttactgagttattcaatgctacctagtatttctgttcttttcacatataatgagataactccaaccctctagaatgaatattgggatattcctcttgtgtttgctttctgatgtggggaatacgtcaggaagtctctcacaaggtacctagcatatgttggcactatgtcttaagatttcccagcctccagcgttataaagcaatgcactgtttctttgtatacgtccctgtctgtagctgctatatatctttatccagaaggacaagcccatcctttgtggtgtcagtggagacaacatgggaaacaacaaaatggcctttgccctttttattcaggaagtctttattggtggaattatgccaatagaaaaactatttcaatgggccatacataataagatccctctaatatgtatagtcttgaaataataggaccatataatggaggctagattagtggtggctacagtgtaagatggtgggggcagtaagaaagtatacataaataaataaaaatagcatgaaggagcttgtcactttgcaaattggtgatgggatataacttggctatatcacacagaactccaaatatgagactaatatgtagctttgtgaaaagtttcctactgaggaagtaaagaaaatatcacaagtgttatctgccttgcttnnnnnnnnnnnnnnnnnnnnttcaaagacctagaaatatttcatcccctgaacagtttcccccattccctttcatactttctctctgcaattcaagatttagaaccctgactcctatcatgaaaatcaatccatctttcctactatcttattgttcacttttaaattgtatgcgtagctctctacccagatcaggaacacgttctttagtaatatggcactagctttcttctgtttatcttttttttttaattgaaagttttcagtttaaaattttgcatttctgtcctgcattctgtctgttctctctcaaataattcatttcattcttgtataatgatattttttctttcccatataaatcacaaattcagtgttctgtgttaatatgcttgttactgtcaccaacttagattcccatgctgtcttagtccaaatctccccagaaggtgaccataggccctgcttcccttgatgctctctttgcatctttcctccagtcactaagtcacttcctgtattgaaaccttgtgtcaaagccctctccttttttttttttttttaatgagggaacctctgtgtagagttttgtgtttctctttaagggaaccatgtgaagctgaaaagaattatataaccgtaaaatgtctgtggctgaagtaaaacatatacatggagggtatacaattcctaaacttcctttataggaatatatcacttaataactatgaaagtaatgaaagtaataactatattacatttcttttttttttttgagtacaaaaccagcctctcagatgaaaatgcctgtgctttagcgttgcttgtatgattttgggcctcaagttgtatatgctattaatttactctgttagagagagaagttgttttccctctgatttgaaagagtttttgctaccgtaagccatactacagatatccagcaatctttcctacttgttagactcggttcctgtaaaagttacttaaagtgatgacagtgaaccacctcagtaacacaaacaataagaaccaatggtgtcttttgaacatttgaactttctactacatcaaggatgaggacgaaattaaagattaaacaatatttttaaggaacagtcaaaaagctgaaaatatgagaatatgctatcttttaaaatttttttgttttttttgttttttttttccattttttattaggtatttagctcatttacatttccaatgctataccaaaagtcccccagagccacccacccccactcccctacccacnnnnnnnnnnnnnnnnnnnnataggtactgaaaacttttatgaaatcccagggcagttgtgagctatttggcccccatggaaattcctaggatctaagatggaatgatttgaatgaagaccccatagaggaaccttagaatatacacttgtgcttctgaaaaagatcagtctgttctataaaacaaaattaagtttgaagattaggaaaaggaaagaaatgttaattaaaattagataaggagaattccaacaggctggctgtttataaaagaagaacatggagtctgcgtggatgattaagcagttaattcaaataagagatggggaggtcagatcatcagaacaccgggtagacactgggtgggcttgctggactacctgtaactctagccttgaaagacagaattgggatactcagagcaagatatatcaagacaagaaatgtaggtaagttttggtttgactgggtgagaccctgcttcaaagaataaagtaaaaaaaacgacagaggatatgtgtacagacatatagtcacacacttgaaaatagggatatatgcacacacatactgcgcacatataaacatgaaaagaagaaggaataattgatacaggaatagatttaaaaactgcacatggcattgtataaaaagatgtattggtgattttaaagagtagagtatagaaaatcatactagtaatataaaagacagaagatggcgtgtgattattcaggagctttcttttgccatgcttagatacaatgtaggcacatggtataacactgagttatatccccagccttcgaaacaacatctattaaatctagtccatttgaaaggtagagagcagtgtttgtgctctagaaccaggctgttttaataataaagatgaaaggaaacctgttctcctgtcaaatacgaatatttaattattgtattagtcagggttctctagagtcacagaacttatggataatttctaaatagtaaaggaatttattgatgacttacagtcggcagcccaattcccaacaatggttcagtcgcagctgtgaatggaagtccaaggatctagcagttactcagtctcacgcagcaagcaggcgaaggagcaagagcaagagctagagctagactcccttcttccaatgtccttatattgtctccagcagaaggtgtagcccagattaaaggtgtgttccaccacacctttaatcccagatgaaaggcatagcccagattaaaggtgtgttccttaaactcggagattcaatcttctggaatccatagccactatggctcaagatcttcaaaccaagatccagataaggatctccaagcctccagataagggtcactggtgagccttccaattccggattgtagttcattccaaatattgtcaagttgacaaccaggaatagccactacaattatgtttctagagaatcttctaagagaactaaacataatttctaattcatagataaaatacatattgctgatgtgcatacatgttcacatgtgcagagcccattgagatttatagannnnnnnnnnnnnnnnnnnntctgatgtggggaatacgtcaggaagtctctcacaaggtacctagcatatgttggcactatgtcttaagatttcccagcctccagcgttataaagcaatgcactgtttctttgtatacgtccctgtctgtagctgctatatatctttatccagaaggacaagcccatcctttgtggtgtcagtggagacaacatgggaaacaacaaaatggcctttgccctttttattcaggaagtctttattggtggaattatgccaatagaaaaactatttcaatgggccatacataataagatccctctaatatgtatagtcttgaaataataggaccatataatggaggctagattagtggtggctacagtgtaagatggtgggggcagtaagaaagtatacataaataaataaaaatagcatgaaggagcttgtcactttgcaaattggtgatgggatataacttggctatatcacacagaactccaaatatgagactaatatgtagctttgtgaaaagttcctactgaggaagtaaagaaaatatcacaagtgttatctgccttgcttctcacagctacataagaatcaatgtccaccatgaagtaattgatttaaaaatcaaaaatcaaaaagaaaacgcttaaaaaaaaaccctgaaatttgagcaatactttatgtgcaataaaatgtacttctttatgtgggcaatataagtaagttttaataaatatacacagctgtggaaacactactacattcaagacctagaatatttcatccctgaacaaagtttccccattccctttcatactttctctctgcaattcaagatttagaaccctgactcctatcatgaaaatcaatccatctttcctactatcttattgttcacttttaaattgtatgcgtagctctctacccagatcaggaacacattctttagtaatatggcactagctttcttctgtttatctttttttttttaattgaaagttttcagtttaaaattttgcatttctgtcctgcattctgtctgttctctctcaaataattcatttcattcttgtataatgatattttttctttcccatataaatcacaaattcagtgttctgtgttaatatgcttgttactgtcaccaacttagattcccatgctgtcttagtccaaatctccccagaaggtgaccataggccctgcatcccttgatgctctctttgcatctttcctccagtcactaagtcacttcctgtattgaaaccttgtgtcaaagccctctccttttttttttttttttttttttttaatgagggaacctctgtgtaaagttttgtgtttctctttaagggaaccatgtgaagctgaaaagaattatataaccgtaaaatgtctgtggctgaagtaaaacatatacatggagggtatacaattcctaaacttcctttataggaatatatcacttaataactatgaaagtaatgaaagtaataactatattacatttcttcttttttgagtacaaaaccagcctctcggatgaaaatgcctgtgctttagcgttgcttgtatgattttgggcctcaagttgtatatgctattaatttactctgttagagagagaagttgttttccctctgatttgaaagagtttttgctaccgtaagccatactacagatatccagcaatctttcctacttgttagactcggttcctgtaaaagttacttaaagtgatgacagtgaaccacctcagtaacacaaacaataagaaccaatggtgtcctttgaacatttgaactttctactacatcaaggatgaggacgaaattaaagattaaacaatatttttaaggaacagtcaaaaagctgaaaatatgagaatatgctatcttttaaaattttatcgttctgaaagtacttgacactgtttcttctttacaagagtgagcgctgtttaaggagtgactgtgtaaaatagcaacatttggccataatacataaactgcagaaacatccattacttttcaaaagaagtgcctatttcagtctattgcctaatctaatccaatccaatccaatccaatccaatccaatccaatccaatccaatccaatctaaccctttacttccaagaagcacagctgatcatcttcttaaggaagcagtctttgaacgatagacaagacctttcagttaagaacagaatattggctacattttatttatcctatgttttctctgtcccctactcctcctctcccttccagtccatctacctcatcccctccctgcccctactccctcctcttctctgtcccctccccatcctcctttctccctgtggaaggactctgataggtactgaaaacttttatgaaatcccagggcagttgtgagctatttggcccccatggaaattcctaggatctaagatggaatgatttgaatgaagaccccatagaggaaccttagaatatacacttgtgcttctgaaaaagatcagtctgttctatggggaaaacaaaattaagtttgaagattaggaaaaggaaagaaatgttaattaaaattagataaggagaattccaacaggctggctgtttataaaagaagaacatggagtctgcgtggatgattaagcagttaattcaaataagagatggggaggtcagatcatcagaacaccgggtagacactgggtgggcttgctggactacctgtaactccagccttgaaagacagaattgggatactcagagcaagatagatatcaagacaagaaatgtaggtaagttttggtttgactggaagagaccctgcttcaaagaataaagtaaaagaacgaccaaggatatgtgtacagacatatagccacacacttgaaaatagggatatatgcacacacatactgcgcacatataaacatgaaaagaagaaggaataattgatacaggaatagatttaaaaaatgcacatggtactgtatgaaaagatgtattggtgattttaaagagtagagtatagaaaatcatactagtaatataaaagacagaagatggcgtgtgattattcaggagctttcttttgccatgcttagatacaatgtagacacatggtataacactgagttatatccccagccttcgaaacaacatctattaaatctagtccatttgaaaggtagagagcagtgtttgtgctctagaaccaggctgttttaataataaagatgaaaggaaacctgttctcctgtcaaatacgaatatttaattatgtttcttgagaatcttctaagagaactaaacataatttctaattcatagataaaatacatattgctgatgtgcatatatgttcacatgtgcagagcccattgagatttatagagtaaaatgagcctttaaatctgaatgtttggtttgactgtagacctgtgtccttatacctaggaaccccccagagtgctatatgaacaagtgaacacgccgtgtgctacggcaatcattgtcaacatgtgggtcacaatccccaaagactattggaaaacacagacgtttacatagcattaatgacagtaacaaaattacagttctagaataggaattcgtaactgtagcaacaaaaataatttggttttcggcggtcagcacaacatgaggaactgtattaatggaccacagaattaggaaggttaagaaccactgtgctataggaatgtggtgcttgtaatatagccagtggataggatatagttttctttttgatctgtagaaatttgctcattaaaagactgacttggctgatttacctgtaaatcacatataagcacttgtagtgacttgaacatataatgaacacgtgggatataaaaatgaaatatattaacactgtctaagtaatctacaatttagtggcttaaaacaaaatacatccattaactttcacatttctatggacctcaaattcagatccaacttcaccaggtaacttcatcttgagatttcttgtgagtttgaagttgggtgtgagcctggtctacggtggtctggaagttcactgagagatttagggtctgcttctgaaatggcagttgacactgtggttactgttgcattttctctgatacccctctctatagggaatggtgactgccttcccccagagcatatgactcaattgtcagagctgaacctgtagtacctttggtttttggttttttgttgttgttgttgttgtttgttttttgggggggttgtttttttgttttgttttgttttgttttgtttttttcgagacagggtttctctgtgtagtcctggctgtcctggaactcactctgtagaccaggctggccttgaactcagaaatccgcctgcctctgcctcccaagtgctgggattaaaggcgtgcgccaccacgcccagcttgctgtagtacctttaatgatctgatttcacaggttataccatgattactgctgtactccattgatcacacaggccaggcctattaattgtcagaagagttcacaagaacacgagtagtaggcagcaagtgtccctggctgtactcttaagagactggctccagagcaacatatatgtaaatactaccctcattttatccctgcatcacacagcattgggttttggtgattataatgatgccttttatgtattatatttcatatctctgagtagggataaacaaatgttgtgtctggccagtagatcacaacctgggttttagcctggaaaggaattttggaaatctggaagagaagaggggctgggctgtgcgagataaggaacgaagacaaaggctcaaggttcaatttttactattccagcactccgttatgaaggaagggggaggggcccaattcccgccaaataatcttggaatccagtagcagggtgatcacgtgatggcttcggaacagcaaagcagcaggttccaacagtgggcgtgacagaacgatttatcaggaagctccatccaggtgtaaacagtggaaccattaaggctgggggaggggaggctacatgtaatgaaggaaagaataggcttgatctaaagatacaattaacttccaaataaccccacccctcaccaccagaaacccattgaattacctcttatccaaagagagggtgcaccacagggacatcatgaacagaaatccctgtgtccatttcctaaacgtgtgtgtgtgtgtgtgtgtgtgtgtgtgtgtgtgtgtgtgagagagagagagagagagagagagagagannnnnnnnnnnnnnnnnnnngaggaaccagagatcactgagtgcttctttataaaactgtaagaaaaattccactacaggagtgagctgtccagatagtgtatctgtgtgagaccggggcttcttgcctgtgacacctctctttagatcggatactttgtaatttcagctagctttttcttctgacatgaagaaagcacaagtttgattcagttaacctcaattgtaatcacattgattttctttcccaagaactttaagacagcatgtcggccacttttgtaaatgtgatagacaaatcatctatcaggaaagcttccctgtagtattccaggcaaggtctgcaattaaagaggatgtcagtgatcccacgcttctctgcagggttcaggctcttggcgttgccatattcttgcacctcatcttgtgaacgtagacatgtctccacagtgtatataaccactgcacagatcttgactctgcagtctctgcattaaagaacatttctagcatccatcctgctgtgaacaaagtcttctttatcagatccaaagacaggtgaagtattctttgaagaaactgtacctaggattggtttttttgattaaaattttttgtgttctagtttatcattccattcctaactggcagggatgacccgccccaactgaggattaaaactaagacttcatgtctctcataatgaaatttacgaagaagtcaataatctttgaaccaccattcaaaggacagtagggcaaggctacaatgtaccatataaaactatccttcactttgtgggtctcttcaatgcagtgagtccttatgagtgatgagtactattctggtgagtgttgcccactctcttcctcatgtaatggcttggccccatttggctgctggaagtaagtcactccttcgctggaataagcaatggaagataactggtgatgtactaataatccattgcctctgagaaatgtttgacggaaaagtccagatgtttacagagggttgagtccaaggccagacttgaaattaaggttggccttgcagaattctcctacagcctttcaagtttcatttgctgtcttgtttttgaaccccttagttagttcagtattctcccatcatgggaatttcatattgacaatcacttaactaaaaaacacttgcttattatggcattttctgtgattctgaagagatgtgctatttttttaaaggcagtatcttacattaaagggttagaataaagaaaatataatgtcacattttggactgaagatttttaaggaataaatccatatgagatcatatcttattaatcttcacaaaagtatatttttatggacaaatgcaatccttttactaagacacaatagaaagaaaggatttatgaccagaatcacatagataaataggaattcataaaaagtttgggaagaaaatggatttagtttttttttaaattaaagtcagctgtttaacacttgcaaaagatttagtatatattaattatgttcaataagtgttaacttttttaaaagagaaaaaattcagaaacagaaaaaaattcagaacagtaaatgttagcatgtgagaatctctctttggcatattcatgagtgttacttaaaagtctgtctgaggctcattaggccatttaaaatcacaggtctatccatatgtagaccaaatgtttaagaaaaggttgcatgcccacaaaagaagttcaagaaaaataaaatgcctcacagctttgccttgaaagctacagggtacattctattgtcaaaacgtaattacactttgccttctactctcaagcagttatagggaaaaaaattctctatcatacactggtataattcccatcttcagaaaactttaatataatctgtaactgagagccacagtttcctttttaaattttctgtttcttctttgattatgtgactgtgattatgaaatccaagtctgccgtgtatggccagtgtagctatggacattctacatagtcagcactaatgatctactggagtgttacgtgtgcgagacaatcataaatttgttatcttgcttcttttaccattgaaatcatccaggcttaccatataggatttcaagtacttactttaaattggagcaaaacaaaaatagatgcagacatatttctactgcaaaagacaactgtaggatgttaacttcagaacatccatatgttcttctaaatatgccttagatattgagaaccttgaagaggtttgcaatgtgaaatgaagagttgaccttcactatcctaggaagactggctctacaatcagcatgagcattgcagtatctcttatataaaaccagagtagtatttacaaatagcacacacattctctcaatacttaaaatctcccagattacttatatacataatgtgatgcaagtgttataaacataattatacaaaaaattatatcagttacaaattatacaaaaagaattataacaagaaaaacatttgtatacctgattcaatgtaatttttcatctaaatatttcttgtttgtgatttttggctggttgagagcaggatgctgatgatggcatcaagaaccgaggggtgtagccatatctatttgttcctgttttctcaagtcagttcctggaactcttagaattgctggagtaaaaagagtgtggtttgtgtgctaatgtggctagttgcccctagaaaacttcagaatatggtctggtaaccagaactaccaaagtacaaagaacagatagagagaagagacattcaaccatatctctacaaatcctgaggaaagaagagaggccaaacattcagctaatcaccaatggccaataattcagtcagtaaaagctatgcagtaagattccctaataacttgaaggagcttggttcctttgagtttttgatttactgaacatacaggccacatggagcatgatatggccaaagagacaggaaagttttgcctgcttattcacaccttgtctatatcttttccacaagtctcttcacttctatttgctgtactttcctttaactgtaaactctacgtatcagaaccacgcaagcaaataaatcgaactcactgaggtgactaatttataaccagttagccaaaggacaggtaccaaactggagctaatgactgcaatttaaatagggagtcatcttgtgggactctgggcctttaacctgtgggatctggtactgttttcaggtatcagaaccaaattaaagtgaaatgtgtggcaagacacctatttgatgcttcttggatgattggtatatagtgtgtggagcaaggtccctgtcatagttagggtttctattgctgtgaagaaacaccttgatcacagaaactctataaatgaaaatatttaatttggactggcttacagttttcagggtttagtctgttatcttcatggtgggaagcatggcagcatgcaggtagacatggtgctcgagagggagctgagagttttacattttgatccacaggaagcagaaaggaaagtgacactaggcctaccttagcatctgagacttcaaagcctgccccacattgacagacttcctctaacaaggtcacacctactccaatatggccccacccactcaaacaatgctacatctcctaatagtgccacattccctgtgggccaagcattttcaaacacattagctaataggggccattccttttccaacaaccacagtctataaaacatttggtgtcaaaaatattagattgatttgtgtatgacagcacagaaatgcttcatttctgatctttgcagattacttaaaaaactagagcagaagccaaattctttactctttgtaggaggatagatgaaagttaacgtttgcctttccctaccttgaaaataatttttatttcttagtttttatgaatgtggctctgccctccatttgccttgtttcactttagtcttttggtgtcatatgaagggaaggatttatgtgaactttggagaggtaacgtgtaatatgaacacagaaaagaggcaactctatctctagtctttcagtgggttgaccctatagcatgttaggctttgaaataaaaaaatctttgaatttgtaatatgtcaatttactctttttgctttaaatttagattttacttcagatgagtttttctgctggagaaagttccttcagtaaatacatattttatataataattgcttttattcatatgaatgaatcccaaggagtttttatgttctagttattatttttttaagttaacaagtctactctccttatctgttgcctgacagcatggatggagagttattttcttagtctgtgaaagcatacttatcccggagaagtctactcctgctgctatagaactggcaattagagttggagatgacttgatactcacagctctgctcaggacagctccttgttttcccagggctcattggttaagtctgagtctgtgttctgatctgggtctttttcaattggactgtcatgtggcccatgtcatctgacctcttcccttagaattcttgctgtgctgccatcctaactcttcatctgttatcatttcctctgttgaaactgactgaggactgagtctttcccagaggtatctttctgggcatctttctcttttcctatgctagtttagtattcatgggtccatccagtctgtgtattccgccccccgtccccccatctacagttccattttagtctacagttccattttatgactcacctacagaatatcatatcctcatattctgttgttacacgttctctttttatgcattgtatgtggctatgccatgatacatgatgctacagataatacatgatgatacagattggttctagatctcccaatggttcatatattaaaagtctagactccagctggatgaactattaacatatggggaaaacattagtaggaagaggttaggaatttatgattgcatgttatgtgggtactgaaaccatggcccatttgtttcagctcttttccaattccaagctactaggatacaaacagttttacttctaaaagtgctcttagtgataggaccaagtaaaaatggattgatgcttatgaaacaatgaatcagaataaatatattgctctttttttacagagacaaaaagctaataccattgagcaagtgtctcaagaatggtttaaacaatatctttttggtcctgcttttcttgtttaatgctgtctctgttctcatttcccatagtgtgatgtaggggatcaaagaactggccatttaatgaatataaaactggagatagtacttggtagcttatgactttgagcaagtggtttagtcttttctttcttttcccttcttttcttttcttcttttgagataaggtctcacagttgagctttggctgtcttggaattcatgatgtaggctaggatagccttaaacttgcatagatctgatgcttctgttgctttttctattagtgcttggattaaaggcatgtactaccatgccaggcttaagttatttagtaacttcgttattttattttccttataggaaaaaaatgagaatggtaatacttaacataaaatatagttgtgcttatcaaataaatattataatttgtataaaaatgaaaaatgtgcttggcattgttatttgcacatagaaagaccacagcagttattgatattttaaaatatggtcctcagaaattaagagctgactgaaaccattgtatgagcagcagctgttgctcagtgactttaaaaggtgggctggtaagggttagcctagcaactggggactctatcagttcccacatactttcttcttagtctgttcagttatacagaggggaaattatataaatctttgtttgcctgggttccgtgagccacatgagaaagtggggctgtgagatctcatgtttaacatgcagattttcatttaattttcttcttttctgcataaaatataaaattcacataatacctgtgagtattaatatgtattttttctgaattaaatatcatgttaccctcagctatgagtgttgttctaaaattcataggtttgatttcaacatttcctgaaagctacacgaagaacatctagcatgccctatacattgagccaatgctcatattttcattaggccttgccctatatcctcagatttctcttgtctaagttttaactagttcctaagcactggaccttccaacccaccacttcttctttttattattgtctaattacttcgcaatgtttgatttgtgagatgatgtgggttctgtacctgttcttgaggtggacctggggtagattcccaacacatgtaaggtggcttaaagccagctgcacctccaattctgggagactgatgccatcttctgacatttatgggcaccaggcaaacacatagtacacatgcatgcatccaggtaaacacaagtacatgtgaaataaataaatcaaaaggagagaaacatacaaatagatagagacatggagagaaggacagagataaggacagaaggggaaatgtttctgtagtttgggtaggaaatattcccactatctccagcatttaagttctctgtggtgctgtttgggaagaatggatgattttggaaacttgctatttggcccccaatcttcctgactaattttcaagatgtgagctctcagcttcctgttcctgcctccataccttctacttgaaactatgcttatccaatgtgatgaactttgaagccatagcccaaataaactctttgtgttggttgtaaggttttctttcttattttatttttctttattcttgttctcttgttttttttttttttcagttcaaaacccatccctctttccttagagagccaccttgtccactggcaacatattcttgtgtgtgtgtgtgtgtgtgtgtgtgtgcagcaaactttattgatggtattcaaaaaaagtaggcttccttagacacctcctattattatgggactctgggatagaaactctgaggtagatgtggagttgggacagggactgctcagtagcttgggaggagcctctctcttgttcccatgtgatgtctgggatgggtgtccaaaggcctctgactccttggaagccaagtaggccatgaggtccaccactctgttgctatagcatattcactgtcataccaggatatgagctttacaaagttgtcattgagagcaatgccagccacagcatcaaaggtggaggagtgaaagttactgttgaagtcacaggagacaatctggtcctcattatagcccaggatgtcatttattgggcccttcgatgcatttcaccaccttcttgatgtcatcatatttagcaggtttctctaggcggcatatcagatccatgattaggggtaggaacatggaaggccatggcagtgaccttcatgttcagttctggcatgaccttgctcacagcactggcaacactagtggatgcaggcttgatgttctaggcagccccacggccacaactccatacttttccagaggagccatccacagtcttctgagtgacagtgatggcatgaactgtggctatgagtccttcaaggatgccaaagttgtcatggatgaccttggccaggggtgctaagcaggtggtggtttaggaagtttttctgacaatcttggaagaactgctgccctcgaattaaggccagctatgatgacccttttggccccaccatattagtgggctcttgccttctccatggtggggaagatgccaatagactccacaatatgctcagcatcagcatccccccatttgatgttagtagacctcattcatgaaagatggtaatgggattcccatgcatgacaagctctccaatctcaagtcttgactgtattgttgaatttgccatgaatagagtcatactggaacatgtagaccatgtagttgaggttggtgatgtggtcattgatggcaataatctccacctttcagatgcagatgagaaggcagctctggtaaccaggtgcccaatgtggccaaatccattaaccctgaactttaccaccttgtctatgggattaggctggtactgaatgagaaaatgtgactgtctctgaaatagggaggagcggagaaccggcaatagatattcttgtttctgcttttatttaattctctttgacatagattgattctgctgaggtggaaagactcaagcttcaccttaaacccctctcagaggtcagttggttaatttcccatcaagtttacaccttgatccctcttctaagccccagcacctcctgcttgagccagttctcttcctgaggttcttggacctgaagtctctaaagaaagtctcttgatcaccagagttttggagtcaggaagatattcagtttgtgaccagaatgaactatggggagatacactgtttcaaaaaattactaaattaaagtcagatcattatgtttttatatggaaataaaataacattcttaattgatatattagaagatagttcagaggaaccaacattttcagatgtcagaatagagtttgactcatgaactcttcttactatagtttatcaatgtgacaagaaaagaagaacattaattaactcttccagacaagactcacctggaactttctttgagaggttacttacagtagaacatgagtaggaagttatatgcctgtgagtgcatgatcagttcatacactttcctggtactttttgttgtcacaatggaagccctaactaagatacatgctctgcgtggacttgtttgtttgtttgttaactatagtttgtcaaataattgaaaaaaaaaaaccgacttatctggaacaaattctcattgttctagtgaaagcttaggtattcagttgatggtaaaagatgagtccataggttttaaagaagattttttaaaaattttcatgtctaaattaaaacatttctttcatctacaagtaaaaagagtacagtttatttagaatgtcaccctcaaagacaaagaatactagattattgtgaataattttccattgacagattaatgtggctagggagtggttaagaggtctcactatcattgtggagaaactgtttggttcctagcaaccaaatgaagcaactcacaaccacctgaaaccaaggtatctaaccatcttatctgacccccatgcacacatttggcatacatttgtnnnnnnnnnnnnnnnnnnnnnnnnnnnnnnnnnnnnnnnnnnnnnnnnnnnnnnnnnncacacacacacacacacacacacacaacacacacacatgtttaatggaagaacagttctgagatactagacagagcttctgtgtcaccactgacctactaggacaagtcctcccttgaattacagttttttcttcataccaaatgataggtatcccatagcagaaatgcaaaaccttcagaaggcattgtgcttcaaaaggtggaaaaccatagcagtggctcatttctcacaaacagaaactcattttactatagctctcattcttgtgacaaagtttctgggcattttttcatttcattgggtggcagaggatggggtagatgagtttgcaggatatgagtcaggtgaggcaggctatgctatgtgttctgagtagttttgtatgagttgtgtgtagtattttatccagtgcacactattccttatcctcatgacttactatttagacttccatatttaagtaataaggagtcacactgtaaattaccacttaataggatcagttccttgtgtcagaagcatacagtgctctagcagaaagaaaaattaatattttgcttttactttttaaggatgagtgcatatggtcaccatactagaattaatttcaaattcatgttcagataaatgggtttgttctcttatgtttttggagtagcaacaaaaggattctgcatttgagcctcattgttgaatcaggaggaggctaaacacatatggtccttgggtcaggagctaagatggtgaacatgatggttctgatttggtgctcggactgtggctttaaggctctttaccaacttccctttgcagtgcctttatgcatatgaataagatctctttctctctttctctctctctctctttctctctctctctctctctgtgtgtatgattagctgatttatgcttaaaaggaattttagaaccagaaaatattttagaacctttagttgacttttcatatagtcatcattacttggtactatttccctaaatctaaagaggtcatttagattaatatataagtattatacctaatgtttaattatttgaaaaaataatcttataagccttgttataaatcatggagagagagagagaggagagggagggtgggtgagagagaaagtgagagagagtgtaagagagaaggaaagagagagcaagcttttttttttttattccctggtatgaatatactaactgaatcttctaactactttaaacatgatagaaagtttttgaacaggccccaactcatttactgcttggtgcctggtgaacgaccgtaggaaccaaatgcacatgggctttacattctgatcactgattattccctctgataaataaaaagaaggacttagggaaaattattttgacaactgagaatctcaaaaataaagctggactctgtggaacaaaactagcccagatgaaccctaacatgcttaggcctctatgtctgttagaaggaaatggtttttatattcaaggacaatcacaattgacaccctctaagctaaaatttatttgactgtgccaagtacccggcacctaatggttaattcacacggagaccagttgttgttgttgggtttgactctaggattaaaaggagagcagaggttttcttactgggagccagatcatgctcatggtatgctgtctgctgattctcagatatcatagccactggtatctgcaaagaatcaaaacccacagagtctgtaattctccccagaaggcagccccacttttccccccatgagcatggaatcagaatcattgtgttaattttatccaaacttaatggagccaaagtatgaaagcctacagtgtccactcatctgctccatgatggcaatggctttgctagttacgagaacaactcaaaatatgatttactgcaagctggggataacggtagagaagataaagttctagaacaaaagtaagaacagaaagcctcaggaactaaccccggctttcttctaacccctgcaagaacctgctgccactctcctctcacacagatgtgagctgaaatgaactccatagtccaacaatgaaacaactgtaacaagagcagcatgatcctgagaggagtttttgggtacaggcaaacaggatggctttcagatattcacacattgtgctaagtatcaggaaaccaatccaattaaagaagcaagaaattttccattgggacagtgtgtgtgtgtgtgtgtgtgtgtgtgtgtgtgtgtggtgggtgcatgtgcatttgtgtgattctcaaaatcctatgtctttactccctgcccccataagagatgcagagagaggaaatattgtgtatgtgcctagagggtcattcagatttatgtattagactaagagaggccccactagtggggcagactgagttttcacagccatttgctagactcaacctatggaatgtaccaacttgggctttggtctatgttaattcagacaaagtagtttccctggcagagccaactcccttcatttgtaaaatgaaactgatgattgacagagcacttatacatatataaatactgaattctaaaacagtattttggcgattctattatttctatctactagatgaggaagcagatggccagagaggataaatatgtttgctaaagtcatgtatgtagtatcagagctggtatttggaaccagatctttggttttcactgtttagcttccctcctgtacttcctctgcaatgagtctgatatacttagacatcctagctggcagatgggaccatggaaaacacctgagcagggaagaaatctgggcatttatttgaaattgatagcacactattccatgttggagtttaatacccaatctaatatcaatgacatgctaattggtgttcccttttcctctccttacatgaattcagttaaaataattactgttttcatgtcctgcatgagttctaaggaaggttactcctttagaccactgcttccaaatagtttcattccaaccttgcaaacactttcctatctcctaaacacagtgtcctgcagtgttctcactgttcttatgagagagtttctgccacttcaacaaattaaatatgcaagtagccaccataaaaactagcatggatgtgggttttactggagtgaatttgcacatacgttcaactccattctgctttatcaactactgtcactcaaggagacctccaggtgttataaaacttaaatttttgacgtttgactggcttccatttttccttttcaatttaaaagtttctgtcaaaggcccaaagtgtgagtgaagactattgtttttggtccagaacctaccgacttttttccatcctggaagaaagctgaaggagccaacctggccagggtgtcaggtctaccctgatatatccaccctggtcttcaactgtgtaatcaggctcttggccaagccttaagaagggaacttctccagctgagccctagcctgccatccatctcgtggacttggcatttaatgagttggtcctgagccccttttcatctcagtgacagcctgaaataatctttattcttgttggagggtttttcagttttgtctctagtatttcctttgcaatagaaacttttattaacattcataaataatgttttccacatactgtcatctatctctctttcacctaactgatcccagattttctggagcttatctgaaaatgatccacattgttaatggacaatttctacattgttcttgcctttggttaagtcaatgagaatggtctgaatttgtgcatttccaaccctctgatttaaataagtcaaagaagaaaatagaaagcatctctcagcatcagtggctagataagtcctttgaaaagatatcttcatctaggaagtggctctgcattttctgacatcaaattgccactttgccccaagaaattagtaggatgaatgtgaaccaaatacctaaagatattttggaagattatatagcaataccacatggtctcaagtaaactctagtggctttggcttaaaagacagaaacagttttgctgagtgtgccttcattatatcatgtaattcttggttgcaagaggaatacttacctgatattgctatgggagtgaaatttccatctgcattccaagtccttaagaattttagatttctatctcttgtggatgtgtgtgtgtgtgtgtgtgtgtgtgtgtgtgtgtgtgtgtgtgtcctaaatattttcatatgcttcttggggaatttagcattttattgtgagggatgtgttaggattttggtgtcaatactaaggaaggaagagatcagagggaagtagctgaaagacaggggttgagtttgaggaacagttgggccaacttgatgaagagtaggacttcttaagtgagaagaaaggagaaaaataatgaaactgaaaacaaccttcagcttccccacagacctgtaggagtagccagtcttttgacagtatgctatcatctgttcatctacagagtttatgcttgagaaatgcacaatctacttccaagaagaacatcacaacaattcttctaccactttaaggatgtttaggattttgtgttgggcagcactgatagctgacttcacagaagggcagagagttgaacatacctggtagtaattttcacccaaagttttttttctcttcatacaatgatgatagaactgacttactttgttatacaagaaattgggattaacctcatgacttgcggtaatcattatttagtgagattattgtgttattccttgtagaaaattgcataaagctcttagcatacaatccctggcatattataggctcttactgtgttagtttcctttctcttgttaattaggcaaagcagtttcaaatgcttttcaggaaatcgtactggatttgtactattaaagcaacaatagttgcattcaaaacgctaactcctccgaaacacctaaaaacttttcctctaagcaacaattgtcactaatccattaaggcagattttcaactttgatattatgaaatttaggattagggatggtcctttgtttcggggctgtcttaggcactaagtgggggttcagtttcctcatccatttgcttttactctccatcatctactcaccacaggacataagggacacctacaccatcggggaaaatcaaaactgtctccaaagttgtcaaatgaccctctgggattgtggttggggcttaactctagtaagggctggacatactaaggtgatgctgaaatttatatagccagagtggctaaatcatttttctaaggttctattggcatggtgagaactacaaactggtttctgactatagtgcacttctgctagtgtcatttcaagtgttttctgtgtacacggtgtgtggatgctggcacagcattagtgcctagcaagtcctctactcatatttgaaaacatctagaactaactttgcattgttgttcataaactcaccagacaggattcttgagaagaaatcaacagctgtgtcttcacagtagctccactctcagccagcaggtatatgagaggagatctgagttcagaatgcagatatgagttcagtctaatgagctccatgctaagccgcctctgttttcctgacaaggcttggcagtctgcattacaagtcatcactgcccaggctgcatcttgtgtttggactgtgaagaccatccctgtctccaaggaataaataaacaatgtaaaaaagcccccaagtgcttctcacccatgtgctattgtgaaataggaataacattcagagccatggtgagccagatgttgctttgttttcttgcccatcctgtagtcattatcaaactcccaaactccaagtctcagccttttccatgtggagcaactggactgctaggaaggtgtgagaatgttaatagattttaatgctgtttcattctcctgactgttgacatctactttttcatgctaagcaacactttcttcattacttcataaatacatgaatatttattaccatgaaggaaaacatactactgttcacagtgactgcagctgaaaaaatgataataaacatgagagattaacaggactcaagagagtaagcagtttagggacagcaaactcaggcctgtggaatgttaaagctgtcatccgaagaggaatgagagtgcttcatacatacaagaggatgttaactggtataaaatagccaaggggagttttagaatattgtgtgtaattactgtgtaattaacatttggatacatagtcataccggaatatttgggatagagtagccatggatatcaagcattcaaacacacacacacacacattcacatatacacacaattaaaaagtcaaaaaagtggatatgtaggaagcatggaggtttttgtgctcacagataatcactatgggaacctagaatgttaaataccccaagttgttccttcaaaggaagggatgcataatctgtaatctacaaagaaggctgaaagtagatgtggttgatagccttggtgacctttgtgctgtgtggtcaaggccacattcagtcatcccccagagccttgttgagggcttttattgtcagtcaatctatagaacctatcattatggaaaacatcacatatagtcaatttttacaacccaattttatggaaggtattacataatatagcttcaatatagtcatgtctgatctttatttagcttagattgttcctcaaggagatttatgtatggttgattgtgcacaaggaattgagttaattatcaccaggaaagttttctccaacttgtgctgtccttaaataagcctaaaataagctactcatgttcagactactgaagtttgaaccaatactggcggtttatttgtattgaattgcactgccctctggactttgaggagttgctttctagctcctcttggagctaacccttttgattagattggcagaagagcaagtttatctgaacatcccatacccagaatcaggactatggatgcatgctgctgtgacttgctttatcttttctttaatgtgggtgtgaggattcagattaatgtgtaatccgaactcaagatttaatggttgtgcaaccagcactttatcttctttgccatcttcccagcccaacgaagaatgcttgtgctttatctgagacttgtgtaactataaagttgttgacccttcaggatcttggcctctctagactctggcctatctggttgtacttccacagtgtctagtaaatggcatatattagtagatagtcagtttatgaggactgaatgagtgaagacagtagtcattctcttgacctcaggatagaaatcatactcttcagcttcatttgacaaagcagcttcttttttcttttcttttgacttgggtaataaacacatctcaaaggccttcagcttctcttctgaatactctgaggtaatagccgtaactgtccccaatgcccattcactccactacagctaatgttcttgtgcctcagtaatcacagtgtgccactcacttggcggacctctgctaccaaagcaaagatgctaagtaggattactattttatgctatgcatgctgtacttggtgtatagagctaaaagttttgtagaacagaggtaaagagatcctgaccctgcctatgacagacagtgaggttgtcccaggttacatcagttgagtcctggataatgagtgaaagttatgcaatgcaagcattgtagacaaggaaacaatttaaaggaatttgtgaactagaagccagtgactgtctgatattcctggggtaaggatggcattagcttaatggcaacttggcaaatgaagatgggatccatgtactcttcaacatacaagttaacgaatagctcaggtctagttatttgaaaacctagaagaagaaagaggcagatgaggaagggatcttaaacctaagttgcagaaatcttcaagagaagatgcccttggatgtgtctgtaaagccagcgccagatctggctgagagaacattcaggatactgctccatcagggctaagaatccagtgtattcagtatccaagaattggaatctactgttccatcattttctttgcaaagttcataggtgctttatgttgcaccagtgaaaataggaacactttttcaacagctctctttttctcttgattttaaagtcatctttggctaattggttggggtcagaggtttatattttgttacccaaataattaataagttaaaatactccaaacagttgatgagtcctaattttgacttgtagattagagtggcaaggcggatgagtgcgtgcctgtgctgttagtacaaacttaggtgccaccaagtttcaaatgtgttctctggccttctggaggaaaaaataaacctgcccctcccaaggcattccagatgttcatgcaatgcctgaaattagagccacattcatttagattcaaggttattacctacccacagtgatgagtaacatttaagtttctatcaatcatggagctttttctgtgtttaaatgattttgactggtgggagttgggttgagaacaagaggttttcaggtgggtgaggcacataatttgctcagttggcactagcttattgggttaattcagtttggtttaatttgctacacatgcacagagcatataccatgtgcaaaatgtcttcgactttggagatgggatttcccaactcttgttctcctcacagttttgttctttatgagcactgagataattacacaacttaccagtgatacaaggagctgctaatggcagagggtgtgcagggacgtgtttgccaatgggactcaggctgcttagaaggctgaaagtgaccactactcgcagatgtcaagatgtggcctttaccgaataatacagaccatgaagttgacttgttcatctataaaccagacaaatgatttacttaatacaaaaatattaaaaattgtaaaaggcattgaaatgctgttaattatcgccagaactcaaatcagagatgtagtcatttgatttactgtctgaactaaactcagagcttttctgaaaattttcattctctgccctagagcatgtttcactggagacatttctgtgactgctgtaggcagctccatgtatctcttgatttatagaagcgggtggaacaaggataaggaaaaagaagatgacattgatttgtgtgggtgagagaattctaaatttcatgagtcaaatacaattcctaaggacctggcagagcctggggcctctgggaaactgtacatcctgcatttctgctgcagtggtctggcctcaaacctacagtcccacacagtgctgaaaactcctctcccttctattcaggcttttcatagatcaaattacacattgtaggaagtgaatgatcatgaaacaagaaacctaagtattgcgtgcgttcaggaaatcatgatggaagcaacctgcttgtcccactgttttggtaacttggaacactaagtggaataagccaaaaaatgctcaggattttgaatgtttccattttggcctgccttcaagctaactactcatattttgtcatgacttaaacgtgacaaacacctgaggaaatgctctatgactttcctttgtcctaaaaaaacaaaaaaaatgtattagaggccatgtggatacttgtatctacaggtactggacactgtggaaatactcatttcagacacctagagcaagaactctttttgagcaggtagcacattctctttgagccactaggaggtgtgtgtgctaaaagaagcaactgcttcttgcttggctgcttaaatatatcaattatgagaactcaagaagaccagctataatctgtcatctcatgacactggcacccacttctcctgggcacccatgtttgctgcctcccaaagagctccgccatgattatgcaaatgtattttaatgttgctttggctaaatttgttccaagaagtgaatgtagcagctcacctctatatcaagaaacactgtggccactccagaggggtaaactcatccacaatgccacaccagttttcacaagccacagaggacaggcttctcttcccagtaccctagggcctgggggcacaaagctggaacttaagcacagtagtaattaattctgaagaccaaccaagttgcttttagtgttatctattacctggcatttgaattgcaggtattctaacaaactgattatatgctaaaaatatgcacaatatcctccagatgttcatctgggaagtgataaaatatttttacaaaagagaaatatattatgataaaaggggttgttcaaagtctggtttttttttttcacccatctgggtatggacaggaggtaaatcccatctttatgctaccaaactttttcttattaacaaaaagagtttggatggggtggctctggagcacttgggaggcagaggcaagcagatttttgagttcgaggccagcctggtatacaatgtgagttttaggacagccagggctacacagagaaaccctgtctcaaaaaaaacaaacaaacaaacaaaacaacaacaacaacaaacaaacaaacaaacaaaagacatttctaaaatgatagcatcctctgctcttataatatgttcgaaatttcactaaaaatctgtaaggtatatatgtggggctttctcagttctttcagctgaggactctgatgtgaaagatagtgtacatcctggaacttgcacacagtgagcaaaggagatatatgttgtaaacacttagctttagggtccaagccctggcatcatgaatgtgagtcttggctgaggcatatgtgcaagataaggagaaactgaagcaatgcccaagaaactcacaggttagtgtaatgtaacctacctgggttaaatcactagacgtgtacctatcactttgttacaggcactttctctaaactcagcctaaaactagtttacaaaaattatccttaaaagacacaaaaactaaagggttgtgcgcagggcctagcacatagcagatgatctggctggggatatggttctcagtggtcagatatcttctgaatctttctgtttggcctggaagagcaggctgactgccaaagcaagcctaccgagaaatgtgaagtctatattcttaccattctgaggttagagatgctgtgctgtgctgagatatttctcttcatgtgtaagaatcttggcacggtatcaatgaagaaataatagagtgaaaaatgtacattttcatgtgacgttttagtaaaaacatcaaagtcaagaaaatctattaaaatcattatccattggctttgccagccagaagttgccttcttagcttcttagacgatgattctgcctcttcctcttccctacgtttggcaacaacctcttgagcatatggcgtcgatatgctagatttatgtgtgttttaaagacactgaatccacatcactttaaatctctctgcttaggggtcaacttacagtaaaactactttcagtttcatagtgatccaacaacatagttctcggccatgtttgcaggactaagggaactgtataacaaaagcttcttgttaacaccatacaagcaccagtgtgggacttccagttcaaaagcaggtcattggaatgtatttcctgggctagtttcttattccatggggccctcacttataaaccagagctgaatttgacactctttcccagtcaaagactatgttacactcaaactagcctgtatcctatgctaacatttaatagaagctttgtatcccactgtcccatctttgttatagaaaggaatagagtgatagccacgtagaatatttcataggagaatctgcatccccccccccccccgtgtgtgtgtgtgtgtgtgttagaggtagaaacagagagagacagagaaaaagagacacacaaatattgtggctatgcatgcatattagttgaagagtgttcattatcagagcccaggtgaccatgactctttgaacacatttctctggagaactcagcacagattcagctctgaactgacccattaacattcctcagatgtgttttgtgagttctcttctccagttaccctctcctttatacatgtgctccaagttctttgaagagtaggaatattgaaggtactgtgttgtaaagcagattttccaaacattgctggattccttcataatgtcgaagagaagatttagcaaacttcagtcactcatccaaggccacactgaatagtgatgttaaagagttatattcttgtttctaggaatagcaagaatagcaataacacttcagcattcttagtacctctgtatcttgtaattatactctgtatttgtgctcacacttataatccaagatggctaaagatggtcatatagctaaagtttctcaaacaaacccccaaatttttatcatatacattattgctccaaatgtggggaccaaggacagaagttagtgattactgtcctgatttttgtgagtggatatcagaccacagaaatgtgtggtcttttatagaatgagactagtctttctgaggacagggctactacatccataacatgaagcagtctgtgttcatgcagtcagtatgactcacagtaaacttctatacaactgttccattcttgggccataatgagaatcaggacaaaaaagaaaaaagaacttcaccaaatataatcgacaaatgtgatgcttgcactaaaagtgaagccctacatatctttattgggaatcttcatttggacgaactgctcataatgtggccttgatctttttccatcatccaggaaacttctagttcaggcttttaattcacgagatcaaaaataatttgataattagatgctgcatttgctggctgtgtgatcttgggcaagtcaccaacttctctgagtccctgtctctatatctctaagttaatctaagtaaattctactgcagtaggaggttgtaaaggttagtgtgggccatgtatggaataactatatgacagaacaagaggatcctgtgaatgtcccactgtctgattatggtgggagggacacacaggagtagagggatgtggcagaaggaagagaataagaacttcctgctaacaggtgaccatagacataaacatagataggcatggaccctccgctgtccagggacatgggcagccccactcaacataggataccacattatatctcagcctacatctctgagtacacatattcagctgtaatgtaagtgatattatagtaaaacctccaggcctcatttgtcagacatgctgaaaatgctaatatcttggtttttagttttttggttttgggcattcagaaatgtgtccattcagaacattcagagaagaattcttccttgctccaaaataatttaaactatcatatttcattttattatatatttcctatacttttattatattgtattttccattctatttttgtgataattatagggtcacagcaaattccaaaactcattcagagaagtcctgtgtacccttcaccaaatttctctgttatacactatataatcatagcacggtttcccagtcaggaaactgatagacagttggtgccctctgtgtgtgtgtgtgtgtgtgtgtgtgtgtgtgtgttcttctcctattttgtcatatgcggatttgtgtaattatcacaagtgtagtaagaacatattacaccaccaatagatatgcatgcttttttttctttttacttaaaatatgttgtttcatctggaattcattcagtgttactaagaaatagaaaatatattgtctaatttctcattttctcggcatcatttataaaccagcatgtttgtcactaattagaagttctgtcctttggtcctagatctttcagaccttgctccttcccatccactacattgagcctaaaatttgggacacagcacaagtgggatataagttttatgccattagagacaattgtaggcagacaagatgcctcatctggcaaaagcacttgtgttgacttctgagttcaatgctggtatccctcaacattacagaagtgttgattttcaacctccacaacacttaataaataaaagaacagaaaggtgcttaaaccaaggttttgagccatttcatctgatggtataaaatcactgcctgtttattgatgtttataattggtttccctggaaggacagcaggtgctgacccttagacatcctcatggccatacatcttagatactcagaggggactggggtaggccagagcttgcgcatctgagctctgagtcacaaagctccagattgccttaatgctcttttccttgactttctttctgctttagatttctcatctattaaaaaaaaatgtctccattgaataggtgtcatgtttatggcaataaaatcatgtgatacctttaagtgggggagcctagaaagtattttaggattttgattattcctaataatagatttcctttattctgtagtaaatatatttttgctttctttatcttagcatttgtcttccgttatgacagtgtttcttacacctggaccatcatcatgagaatcttgtggttaagaaaatatggttgttgtgagggttaaatactgctaatggttattaagtgcaaatgtgccctctgctctctgggagaaatttctaatggctgtgatttcttcggctgtgatggcagtgagtgacatccacttaacaacttcccggatgcagctctagcataggagcagccaactgtgttcctagcaccatttcacagggtagaaggatctctctgcatccttccctagagaaagaacagcattgtcacacggtgctaggcttatgttaggtgataagactctacacttcatcagcccttttctcttctctggtgtccccttcccccagaccttcctttaccttaggatgatcagtctttccctttagaggaatatcacaatggttgtgttcatagttcagctttgctgcatatcctgttcatctacctctccttcagaatgcaagacacatctcattattaatgtgttctggcagctctcttggctatcctgtgcaactctactaaaccctgatagtgaatcgattatgtgaatcaatgtataatgctgaaaaataaaaaggaacttgattttgttttatagcacttagggtaaaatgtggagttttgcacatgctgggctgatatcccagcctcaagatgagtggtataaatttggaaccccagagtaagctaagaaaatgctgtaaaagttgctacataaaactatggattaaataaataaattggaatgtcacatgggaaagcagaacgttctttcctttgctttacctcattcccacaatatttgaaggtgttgtgtacgtgtgtacacacacacacacacacacacatacgcacgcgcgcgcacacatgcacatgtacaagctttgctctgagttgtcactataaacccaagaagtatgctgtgattataacttcctagagacacattcctacaggaaatgggctgcaaagaaggaaaagtacatttccctgaaggaagtgctcatagaaatcccagtctgggaaacaaatcatggagaatgtttaaataggcttctggcttttggtattggagtggtaagatagtgtctttggtcccagggaaagcaatttcttttggacataaccctgaaggcatgtgaaagatccaggcttaatttaaaaaccagcaccttcattattataacttacttttcctaaaccacctgaccacaggctcatataccacaactaccatcatcaggaaacttacaaataggaaaattgaatgccacttacaaaagtagtgtttgggatttccatggagttcagccttaaatattgcctctaagtaaacgctggcagggtttcatcccttcccaaagaattgacttcctttttaagaattgcttgtatgattagaaatcataatagaactccgtgccttccacatttaaaaatattctgacaatatgattttagcaacaaataggaaattctcttagaaacaaagaaaaaaccttgatgatctactcaatgacctgacacttattgacttaattcatactctgaagacagtgatatgatcattagttcgttggttggcttcaaataacaaaaatgtagactcagccttgcttgtcagccctctaaagtactgcacaaagtaataggagatgcttcataaaactgtcctgtgctaatatcagtatcagacaccagtactgacctcttgctaggtactcagtttcaatgaggttcattagatttctttggatgcctgagactcattgcttaataaatcttccattgtcgttcaggttgtgatatgagaaaaaggatcagtgagtcctatggagtgcatagtgtatgcacagtctttaggtccattcagaactctcatgggttaaagtgatgcatgagctaatcagtttaccttctggaagctgttagtctccatcatacctgccaatatttgtgaattcttttctaccaaagagtaatcatcccctcccattattgctcttaaaagagcactgtattcatctgtcagtaaataatatcttagtctgggtcccttaaagcaaaactgagaaaaaaattatgggtgcacaaatttaatgagggagtagccattattaaaaacaaagaaagtaagccggtccatgtgggaaaaagaataaatgaagtatggtcttcagtggggtccagggctccagagaaggcttagtgggtaaaggttctagcagaaaaaaaaagacaaccagatttggataccccaaatacctgtaaaattcatcaccatgcacagctacaatcccagcacttttgtgacaagatacgagatagaagcaagagaattgacactgcctgaagcttgtgaatgactccgtttggagtatgcagcaaacgtaggagtgagggcgagctccagaaaagttgtcctctgacctctgtatgtgcatgcatatgcatggaatcaataaatattcaatggagtctaagtcttgcactgatccatgggaatcaggccaggggtatcctgttcttcaagagaactaaccttaaggtctctactgccaatcattgtctgcctcaagaatgagaggtgttttgtgggtgactttatgagcatctcttctcattcttttagtccagggcagagtaaggccatcattcctcaattcttctagagaagaggcacatatggtggcctatgtgacagtactatcaagaggtcccagtactgactgcttacagattacaacagttgttatccaacttgagtgtgtgaatcactcagagataactccaaatacatataatttctaggccttactcccagagctaacaggttattttaacaagtttcaggcattattgatgcaagtcaaacactggggaactaccttgagagtgactcaattatagctggaggctatttgaagacagtctacaacaagaaacaaatggtactctgacaggctcaagacatcatacaggccttacctgagaagggggcaggacatatgagccccacactacactgagcaaagtttctgggaaacaattcttggatgttcttcctttcttcagagttctactcttcactgagagagccacagatcttcacaggacatcaaacattcctcatgttagtccccattaccctcccacgcagaaaggcagaatgctgagcaaagatgtatttccacatatgtgaccttgaattttcctttctttaaaaaggaaaaaaaaagattatggatttcttttcctcaggtatgaggaggaaattatttgtgatccacgtaatcatttatagaaatggtagagatgtggcacttacagcccttgttttatatgatggtaggactctgaggtagagatggctttcatttttaaccaagaccttatctgaaaatccagggtttcagtctatctcctcctacactcccactcctaaagattttgataaaaaggggtggctttaatgcttaggatttgtggggaggtatagattttgaaaatcatgcctaaaggaaaaacaagagaaaaagtttctaattactcaaaaccaacccagaagagaagacataaagcagatgctgaacctagatgatttgagtggaggagccattattgataatggcaggcttactgaaagaccagccccaggactcaccagagttttgattatttgatttttctcctccagggaacttaattgaacaaagtctccctcaggaagttttattcaaaaagatgccatctaaaataaactgaagtttcatgtgcagcttctctgtggttaatttggattgtagcctcatggtgttctaagagggagtgttgccagcagaatgagacaaggaaggagaaagaagtgtggggtgcttgactgggaggcttggtggccacttaggggttctcatcctgcttactgaggtcagtgaagtgtgtaaattggagaatatcagtcccagattcactccagggctaggcagggagcaccagtaaaccaaggctaagaagcagaaaaacttctctggtgtagtaaagctctttactgaggaaaggctcagacttggaccctgaagttcaaagacaggctggagataatgatctctgttgtgatagtttgtcacagagatagtattttttgcaaactttgtctaaagcatggccacccccacccccgcttcctgttgcattccccaccagcgtgcactcccatcctgtcattgctgtgcatggtgtttggctcctccaaagaacattttcacaaattcctggaaccagtcatttagattaatactgttgtgtgaaaattctttttaaaagaacttttattaaatttgtttttcataattttatacatatacattgtcttctgtttcttttccacgaattcttatgtctctccagcctaggcaagcccatccctaactttttacatgtccccttcccacattcatgattttgtttgtttggtttgttgttgttgttgttgttgttgttgttgttgttgttgtatgagtgtgttttattgatagtaacagagtccacagtgttttggacttgtccattgtagtcttgtggactcatcagtgggtatgcacttgaagacaatgactgcttcttccaccaaataaaagaaaaaaaatcgtcaaatcgtcaagcacagaggagtaggacccctgtttttcctgtcttgatccatgttcaccattcacaggcccagtgtagatggtagcagttactatgcagttaggactgtactgtttttttttttttcatgcccaggatacagtgttttgatgccatttttcccaccttacatatccttaccacccactctccagtgttctgcgagtctgagagggagttgtataaatgtcctgtttaaggctgactactcaattgctccttatgctctgtaccatgaccagctatgcagcgttatactcactcacattcattacaaagagaagcttttctgattaaatcggagagtagcttttgtctatggggtgtaaacatgggggaagggagaaggattccatgtcaatttagttaaacagagaaggaagtttttacttggggcctaccttcttctcaaccaggccataatttttattggatttacaataccaaacaggaatttcttcttgtggagtgagccttattccaagcagtgatcagttggttacttccttaacagtgttgccactattgtactaatagatatgttaccagtaggttggtagtatgaagaatttacaacttgaaagtatgattaaactttttctctatgtccaaaatcattagagttttacaagccttttaaacaaagtatccaaagtcataaaggttccttggagtagcctacacatttctgttttctgagaaagaaaaagcactaaggcagaagactttatgtttcagttcttagtcacttcagtaattaaggattgtcttcaacacagagaaaccaaggtctgttgactgagcaagcagctcaattttgaaagcactggaaactagctttgactttgttggatttagtacatggaactaccacttgttgataatatatgattgctagccactcatcaattttagaatatactatttgttaaaggaacaacaccaacaccaatgaagaagctcataggaatggtatgcttaaaaagtaacctatcttcacttagctacaagtgatttctttaaaggactgatgtatctccccacttttctagcaaaataaagtatattgcagctcatcatagcaacctcagtgcccagctcacactgtgtatgacacatatgctgacttaattttttaatttgttgttgggtgcttctcaaacctcgcagagtatcaggtagcatgggatgagcactactcatcatccctgtagagaaaagcagagtttactgtagtataaaacctagctcgagagtaaactcctacttgtcagaaatgctgcacgtataacatgagagaacattggcttcttttcttaaatttattagagctaccaactttagattagtcttagagaaaacatttcaacattcagcctttgaaggaatctcagtaaagcagggattctcttccctggggtggcagctctctaacccagaatgagtgtccttggcacacatatgcagggtttacatttccctagagctgatttagaaagctgaattcagaaaatgctgacagagttgtcttcacaaatcctttgtgttaatgttgggttccagcaggtggtgctgttgagagacagtggatgctgtaaaagaaagtctgtggaaggaagctgggttgtttggtagtgtgccctagaagggaacattgggaacttggctcctcctcttcctttctgtttcacctcgctaccaccatgatgttggcagatttattgcaaccacttcctctgtgatggtcttccttgtcataggctgaaaagcaaacggctggtagattatgggttgaatccattgcaatttgtgagccaaagtaaattcatataagatgtaattcagatatcaactgcaattaaatgacaaaactctatgaatttgttttaaaattagaacgtctattttctctcagcaagggccaattttaagtgcaaaagtctacaattgaaggctagttggggaagtagggcattgttagttctttcccacttccttacctgttcaccacaacttatcaccctagttactcactaggagaggaacatgagcaggcagagtagaggggaagggcaaggagagccctacttggtgacactaagggactggctgaggactctagctgcctgtggtgttgctggcattcgtctcactgtgcttccacagatcgcttgcagtcttggttcagccaacagctgtcctttacctggaacattagcatttactcagacctaaatgctctaagtgtgctagcataccatgccatacaatgccatatttaccacactgtaccatatctaccatactgtacctactccctttcatatctaccctacccaactgtactataccacacttaccataccatacttatctacttatcatgacataccatactatgccatgccatgccataccagaccagacttaccatcttagccactctccttaagtctcagttataaagctggatgacagaaacatttttccccacctccatggccaagggtactattctgtataaatgtcaccacattctgacttcatacccatgaagtagctgttaaggatctcaaatttgatttccacctctgccctggaaaaactacaaaagttgtctgaaaacacagccacttcatgtttaacttctggcccttaaactgaattgagacaaaagtaatcctacttcagtgtcttatagctcatgaaagtcctgctcttcacaaagcatctaccaatgtccaatttgaatattcctcggggaagtgccagctgtatataaaattgcttcagttattttatttgctggtttcaccatcactaactatatcattgtgcttttcttcatagtctcttcccttttggaaagaagtcatttgaccacattatgagacatcatgtgtaatgcatttcccatttgccatatagaaagctaaagttattaagtgagaaagaaccaaaatactgtgtcactttgcatggtgacattatttaggtaactttgattattgaaaacaaaccaaaaaattataaaaaaaggaacaactactcatcctctcccaatgacttattcttcccaaattcaaaagatctttcaagctctgcccttcactgagttaaatgccttacacgcagacagctatgctcctgctacagtttctgttaatctcccagttttgcctgaagctatgaagtcaaccccacagcacagcttctttccagcccctcctctccaaatgaaaaccatgtgcttgtgtgcgctggcttttctttccttttaaaagttattctgcattatttaatataaccatgtactaatgcagagaccttcagtaactgatttctcattggctgctatcaattaagccacattaatacaaccatttagtctcagaagcaaattcgtttacgcacaaatgacttgcttaaagctgattgtaacaccctagagaagcaaaaactctgaatgcttgcaagtagagctgaattgaaataaatgaaaatagtacattgtacctatttgatgcctgtgcagcttcccttcatcattctctgcattttctcatgcagccaattgataagactaaactcccagtttgtactgttctttctaaccctggtttaactaaaggttgaaacatctacttcataccgaagttgtgccatattccagaattccagacacaaatcagaagttaacactgtgagaatcttgggctatggctgctctcatgtatcagttactgggtgtcattgagaataaaacatcacaagggtgtggtttcggttataaagattgcatttggtgcgctagaaagatgactcagtgggcaagggggcatgctnnnnnnnnnnnnnnnnnnnnnnnnnnnnnnnnnnnnnnnnnnnnnnnnnnnnnnnnnnnnnnnnnnnnnnnnnnnnnnnnnnnnnnnnnnnnnnnnnnnnnnnnnnnnnnnnnnnnnnnnnnnnnnnnnnnnnnnnnnnnnnnnnnnnnnnnnnnnnnnnnnnnnnnnnnnnnnnnnnnnnnnnnnnnnnnnnnnnnnnnnnnnnnnnnnnnnnnnnnnnnnnnnnnnnnnnnnnnnnnnnnnnnnnnnnnnnnnnnnnnnnnnnnnnnnnnnnnnnnnnnnnnnnnnnnnnnnnnnnnnnnnnnnnnnnnnnnnnnnnnnnnnnnnnnnnnnnnnnnnnnnnnnnnnnnnnnnnnnnnnnnnnnnnnnnnnnnnnnnnnnnnnnnnnnnnnnnnnnnnnnnnnnnnnnnnnnnnnnnnnnnnnnnnnnnnnnnnnnnnnnnnnnnnnnnnnnnnnnnnnnnnnnnnnnnnnnnnnnnnnnnnnnnnnnnnnnnnnnnnnnnnnnnnnnnnnnnnnnnnnnnnnnnnnnnnnnnnnnnnnnnnnnnnnnnnnnnnnnnnnnnnnnnnnnnnnnnnnnnnnnnnnnnnnnnnnnnnnnnnnnnnnnnnnnnnnnnnnnnnnnnnnnnnnnnnnnnnnnnnnnnnnnnnnnnnnnnnnnnnnnnnnnnnnnnnnnnnnnnnnnnnnnnnnnnnnnnnnnnnnnnnnnnnnnnnnnnnnnnnnnnnnnnnnnnnnnnnnnnnnnnnnnnnnnnnnnnnnnnnnnnnnnnnnnnnnnnnnnnnnnnnnnnnnnnnnnnnnnnnnnnnnnnnnnnnnnnnnnnnnnnnnnnnnnnnnnnnnnnnnnnnnnnnnnnnnnnnnnnnnnnnnnnnnnnnnnnnnnnnnnnnnnnnnnnnnnnnnnnnnnnnnnnnnnnnnnnnnnnnnnnnnnnnnnnnnnnnnnnnnnnnnnnnnnnnnnnnnnnnnnnnnnnnnnnnnnnnnnnnnnnnnnnnnnnnnnnnnnnnnnnnnnnnnnnnnnnnnnnnnnnnnnnnnnnnnnnnnnnnnnnnnnnnnnnnnnnnnnnnnnnnnnnnnnnnnnnnnnnnnnnnnnnnnnnnnnnnnnnnnnnnnnnnnnnnnnnnnnnnnnnnnnnnnnnnnnnnnnnnnnnnnnnnnnnnnnnnnnnnnnnnnnnnnnnnnnnnnnnnnnnnnnnnnnnnnnnnnnnnnnnnnnnnnnnnnnnnnnnnnnnnnnnnnnnnnnnnnnnnnnnnnnnnnnnnnnnnnnnnnnnnnnnnnnnnnnnnnnnnnnnnnnnnnnnnnnnnnnnnnnnnnnnnnnnnnnnnnnnnnnnnnnnnnnnnnnnnnnnnnnnnnnnnnnnnnnnnnnnnnnnnnnnnnnnnnnnnnnnnnnnnnnnnnnnnnnnnnnnnnnnnnnnnnnnnnnnnnnnnnnnnnnnnnnnnnnnnnnnnnnnnnnnnnnnnnnnnnnnnnnnnnnnnnnnnnnnnnnnnnnnnnnnnnnnnnnnnnnnnnnnnnnnnnnnnnnnnnnnntacacacacacacacacacacactgtcagtgactagccatcacattctgacaagcacataggctacaaaaaaagataagcagcccagaattcaccttgtactttcctctgtattcagaggtcaagtccccattctacctccttgtgatatcttccagctgattccttctgtttgtccagatgtgtccttggactacttcactctcatcttccatcacatgctaattaggcattcccagtcaccattcctgtactgtgcattagccaaccaatcagtctcctcttgtggttttctgctctttccaacttcctcttgttttttccagtgtttttgcttttccagtgtccagtgtgcatcagtagaaaaaaaatgctgtattctatagcacttggtatgacttagccatactccttacttgatggtgttctgagcaagatatctttattcatctacctgtcattaacattgaacagagaatagttgtttactaaagtagtttattacatcattggttgaatgcattaactggatttggacgttgcatatgatagacctgtagactcagttgatgatcttgacagagtacagacctgttctccattttatcatatttcatgagcagccttgtctcagtaaactcagtgggattttattgacaggtgcagcagacagactttttcacaccacatagtcgttccttctctcagagtataggccagaagaatgcccatcagcaaagaatactagtttctgggttgctggattctctggttgcaactgagcaatgatgacccagggaacccaaataaattataaattggtagttaaccactaagtctataatctctttggacacactagaccatggctttcaaaccttacctcaccccaaatctgcctttgttgccatgagtttaatcagtgaatggatatttcataaatccttatttaaggctgtgatctgacagaggtaacttttatagtaaactaatctttatattagtatacaagcacaaatcttcttagaacaaatgattaatcatttgaaaagtttttgaatattaattttattacatgtttgaatgtaatgtagaataaaatataggtatttttccacatcaaaagagaggaatcacaagcatgacggccaatgatgaaactgtttctgaaaacttgaaagcttctatgtgtttatctagcaaccagttatttaatagtataatgaggaaagtttagatttatttagactttaaaacactgatggcattgtgcaatcctattttataagtatcactaaaaaggaaaaatatactactaagttttgctattgagtcaatgataaaatgtgacatgatttnnnnnnnnnnnnnnnnnnnntaaagctgattgtaacaccctagagaagcaaaaactctgaatgcttgcaagtagagctgaattgaaataaatgaaaatagtacattgtacctatttgatgcctgtgcagcttcccttcatcattctctgcattttctcatgcagccaattgataagactaaactcccagtttgtactgttctttctaaccctggtttaactaaaggttgaaacatctacttcataccgaagttgtgccatattccagaattccagacacaaatcagaagttaacactgtgagaatcttggactatggctgctctcatgtatcagttactgggtgtcattgagaataaaacatcacaagggtgtggtttcggttataaagattgcatttggtgcgctagaaagatgactcagtgggcaagggtgcatgctactctttcagaggttgtgagtttgtttccaagcatccatgttgggcaactcacaacagcttgaaaccccagctctagtttgtaactgatgtgacctctaaagatgctacactcacttttacatacccacaaacagatcctcaaacatacacatcagtaaaaattagaataaaccttttctaaaaattacacttttggtcctactgaggcacatagttttaaaattcatcatttacttttaaaaccaaccaaacagtgtggataagccatgctttactctcatgtgttttagttgtgcaagaaaggacaagcagtttacagatgtgggtagattgggatccttttccattggcctaatttgtacaatgacagaatacctaccaaagctttatagccttcccaaagcaccctttcctatttcctacagaacctcttctttctttcagcattctggtgtccttgctgaaaggatgtccaggcactgggcactgaactgaactggggggaatggagcttagctgggggatgagtgggttaggcagaacatgctgagtacagagaaaaggtcttctccggggatggttttcagaagaaacagctctgtttattgggagtgaatatcacccatcagcatattccatcaacaaacactttattttctttttaaaaaatgcaatgcttattccacagcaannnnnnnnnnnnnnnnnnnntgagatttcatacatgtcatatttagaatacactatctggtagcaaacatcttggccctctggcttttacaatctttcctccctcttttgtgcatttttcctcatttattacgtgtagtattttgttgtagctgtacaaaccactggggctatgcatcccactgcctgtttctctctgcattatgactagttgtagatttctcgcatggtctttgtctgttccaaagcaaacttatttgatgatgggcgaactactcttacttgtgaattcaatgattgtcatttaaagtgcagttaggaattatactgttttgtgaaagtggcagtagtggctaccctggagagtcactgacctctaccagctacaggtacttgagtaggtttaaggagctagccatgaaatccctcttatcgagcatgccttaattcctgtttgatacctgttgattattcccagtgtaaaatctgaagctctgaaactgctaaaggaaagcataggcgtgatgaggtgtaaatgtaggaaaggcatcctgaatagaactccatttgctcagaaataaggtcaaaaattgacaaatggatcatcataaaactaaaaaaaaatctgtaaagcaaagcaaaggaaacaattattccaatgaaggggaaatcccacagggtaagagatatcttttccagctatgtatctgatagaggattaatatctagaatatacaaagaactcaataagaaaagcttcaagaactcaaagacccaattaaacattggattgcagatctgaacatagttcttaaaagaaaaaataaaactggctaataaatatctttaaaagattttaacaattatagaaggcataactcagactactttgagattttatattgtcccagtcagaatggctaaggtgaagaaattgactaacaacaaaatcctggccagaatgcaagggaaggagaacccttattcaccattaataaaattccaaattgctgtcaccactatggacaatagtatgggaaattctcaaaaaaaaaaaaaagttaaaagtagttcttccacatgacctagctctatgacttcttagtgtatgctccctttatatccttcagaacatcagctgtgccacccttcctcgctcacaggcctttgacagacttctttctgggatagtgtagctttgcctcatttccttcttctgctactctatagcctggtccatttccattctcttccagattttcttttgtatctctagtttattatcacagtaggtctccatttcctaggcctcactctctatagtttcatatattcattgtcaaccccaatcttaaaatattgaattgaaatttttagaaataaacaattcataagcttgataatatgtgctaattttgtgaacattatatgaagtctcatgccatttttctccatcctatcttggatgtgaattagccttttgtctagtatttccatgctatacccactacctgcctgtcagtcacttactagaaacagccattgcataatagcagataataggattctaattctccttatgttcttgctggtcagtggcttcccaagctaagnnnnnnnnnnnnnnnnnnnnnnnnnnnnnnnnnnnnnnnnnnnnnnnnnnnnnnnnnnnnnnnnnnnnnnnnnnnnnnnnnnnnnnnnnnnnnnnnnnnnnnnnnnnnnnnnnnnnnnnnnnnnnnnnnnnnnnnnnnnnnnnnnnnnnnnnnnnnnnnnaatgaagtcaagaagtgtgttaaaatagagagtgtattgagctaaagataaaatcccaagcaagagtagatatgagactgtaaaggagaatgaaaggaaaagacatacaagactagaacaagcccatggcaagcttacaggaatcgttctgatgattcttattaccatgcacagcagtcctgtgtggcagtctcagcctttggttccagatcccatacatacatatatgaccttaggtaagtcacttaatctattgatactttagtgataagtgatcttgttaattatgatctatagactcacatgttcttcagttgaaaacataggttatctttgtcacttatcaaagtggccacaaatactcagggtgacatagtgaagttttataaaactacaacataaaagtgtacccatcttcttggatgggtacacattttttttgtaatggggcaaagttagcatcatatttaaaatccacagaaataagaaataggctgtggatcatatgcagaatgtgagtacggttctacaacaaaacatgagaacacaaagaagcttcatctatggcatgggtctttggaatttctccccaaatctctgaggaagaacatttattccatcactcttatctaccacttggggtctttcaagtgaacccctgaggcactgactgctgtattattcaggttcattccagcaaagtaatatactcccaaggtaacaggataatagataaatctaactaataacagtattgttataaatgagaaaatgataactttaataagaaaatgatacttacctgttgctctttgaatacatattttgtaagaaaatgcaaaaatcctatgttgtggagaactaaaccaccagttttggctaacatgaaacaagcttttgtagcaagaggtgaataagcctgaaaggctaggagcttgattttccccttgtcttacttagtcccacctttatcttcatgaatattatcacccacatgcagagctacggttaatgttttctgatacacagacaataaggaaacagcccaatgcccaggaccctctgtacccaggttttggtactagggtgcagtagcagttttcattctgaaaatgtgttgacagacaactcagaacctggacatccactttctcagatgtcgcttaaatgaaaaccctgaattaaaagaggaggacgtccacaaaatgtgaagggaaagccagatttgtacaaagtagaggcctgttaatacttttttaccaaatgaagaacactcattcaagttagtgggttcctttcctttctttctcttttcttttatctctggagaggtcttagagacatatatctgtgcccttggggtaatttgttgtttgcaacagtggaggcaaatcagagtgccctcagagcctctccttgtgaggcatcatggtgaatgctgcaatgcaaggaattttattgaggactgcaatttaataaatgttgaactatctctaggtcagatctagtgcatctcagtcactaccatctgtcaccaagctgcagccaactggcagctggttggtggccattatgaaattcattagtaattttagttcacttcttaactaatgaacattccataactgaccattttcttaagtgcttcattctgttcctgtaacctggacactctttctctctgagcagcatggcttctagctttcacttgctacagtactggtaaagtatctttgaactccatttgtgcacatgcatgcaatctggaaaggaactgggggataagttttatctatagtttgaagttgaaaatatggttcccaatcatatttgtagagttgggagtatttcaagaataccctttcatgaaaattttagtattgtatacatatattctggtctctgatgaaagaatttctgcagaaggctctgactggaggagaagggaaccttcttcatttacatgtgaggaaatctagcttggattctttcattggccttaagttttgggttttttgtttgtttgtttggttggttggttggtttctgttgtttgggttttttttttcttttcttttttcttttcttttcttttcttttcttttcttttcttttttgtgtattgaataattccacccatcacaccttgactaaggagagaacttcccttttatgggtgttggtaaacatgtgttttgctaccagtaaattcctctaaataattatggtaaataatgacaatgtggagaaaacattgaacatatcaaagagtgacagccagaaaaacaaggcaagatactcagcacttcaccctagagggctcagttcctccttatactgcagaagggcatcacgggaaggtcatattttcgttctatgtttacattgtaaatccacataattgagtgtggggaggacagaaggaggaagaactggaggagagaatgtgactcggtgagggagcatctctggaatgagctggaaacccagaacaatggaaacacaatggtgatttggttggaagtcaaagtgcaaagggaatcaaaagcagcagaatctctctagcctttccgaggcttcctgggatgacgtcagaagcaagtcacagactcctgtgggctcctgctctctatctctcacttgggaagcatgtcaaagaagaacagtgaacatttggaagctgtctgctttgagatgaacagtatgaactgtcatggtcctgttcacttctttagtcttcttcctgcacaatctatcatgctaatggaggtataggaaaggcatcaatatgcccagaagctgctggactccggttctcaacaattcacacgtagaatgcacctttggctatatctatttagataatagttaataagtaatctcagcttatattgaagatgatcattttagcaaaaaaactagtatcccgagtcccttgtgttttagggtagtctgaaatgaaaaggacgaaatggaataagtaaaaatttgttcacaaaatttaaatgcactataaatcttgttcatgggtagtttttgaagtggcatgttgagtcttaaaaactgtgctgttgagaatttaggtttttgtatatgtgtgtcagtaaatcagcgatcttataagcgtgtactagggaaatgtattggtgaatgcatttcaggaacatgaatattgcatgtaatgaattgttcatatgcaaaagatattttctcttaatttgaagagaaaatgagcaggaaatgagtgaaannnnnnnnnnnnnnnnnnnnnnnnnnnnnnnnnnnnnnnnnnnnnnnnnnnnnnnnnnnnnnnnnnnnnnnnnnnnnnnnnnnnnnnnnnnnnnnnnnnnnnnnnntattgcatgtaatgaattgttcatatgcaaaagatattttctcttaatttgaagagaaaatgagcaggaaatgagtgaaacaggaagtgctttgtaacagatacaggtcagtcctgaaaccaatcttttaatttcacattctaaatttgtttaacaaaggcagttgagatattttatatcaagctagtaaagattttatattctcacggttacataaatcatggcagatcttctcagcacccatgtttctctgttccaaatggttcaacaaaacctagagccacaagcttctgtcacatggtgggtgtcccatatagtttatcagaactttgtatttaccctcaaagagcttaacatcaacaaggcctgtcctacaagcgacaccactattaaatcatgaggctgccactttttgacagtcctctctctaggaagtcaagccaggatttctcctagagttgacaggcccacatgtgtcacagcagggaaaaagcaaaggagacctcatcctatctccttaaagcctctgactgctggaatggttgggcaccttcccatccctgctgtcagtgactgtgagttatggtcaggcttccagtagcttcatgagatccttgctccactgccatggtcactggatttctctgttttacaataatatcccaacaccatccaacagagagcacagagtgacaaagccagtcatcaatggcaaccactctcaagggttcaaaagaagccaaatgcattctagagtccagaggcaaataggaaggcaaagcctgaggttcaagcatcacaaagagacttatcaaggctcagactctttcaagaatccaaaaacaatctccaaactcatttatctgcttcatgtatagaaataaaaagcagctgatgcctgaaatggaaagagaagccataaatgagtacagtggctgctgggaatgtccatcttttgttctccacaaggagtcagtcgatgcaactaatagatactcccaaatgtgtctttaacccttcatgcccaccatttttcttggacttttgactcaccacatgcgccctaagtcatatctggccacctctccccaaataagccaattcaaagagccaacttaaaaatggaaagcaggaaaagaagatgtgttcaatgtactcactctggaaagaagacaaagagatccagtgacacccccatgtccattcctgaacggaaatcaacactgaaacagtgggccaagggtaagtacacctaagtagtcctggtcaaggtgtcaccctgtccaccattgatccatcattgtctactcttcagtctgaacctgcaaggtggtctgacctgctggtagacctgtgtgaaatctcttttctggagctaagttcccctgatgaatggtgcctcttctttcccataacatgccatttctagggaaattctcatttctttgggggggggggttccatgttttaatactccaatagttaggttgtaagtcctaagtgtctcttagtgtatcttcatttctgctcgcctggttatagtcacataatatgttcctacgtatttaagatcaatattaaggtgattcttccctcaaaagaattatcctgttaatttttctctttttctatcaacttctttttaaatttctttttcaggtattctttccatctccatattataattttttttaacttaagctgtattattcaaaaaaagggctcatttataaatcacatacatcataacaacatcagtattctcaagaaatatttgccacatggaggtgactgttccaaaaaacaaggtgtcagtgacttgcttctgagctcagctagcatgaggtnnnnnnnnnnnnnnnnnnnnaagtaaactgctagcttcccttcttagctaataatagtccaacaaaaaagaaaaaaaagcagattttgactttctatttaaaattgtctgcagttggggacttgggtatgcgagtgtacatccataagtgatcccaatgtcacttcttttcaagaaaatcatctgaatattttgttttagtggataagtatgtatgtagtatgcttgtacatatgcttgcatgcatgtacgtataggtatgttttcatgccctgtgtacatatttgtttagatgccagaggttgatgccacacaactttctcagttgctctctacattttttgagaatttcatacctgtgttaccatagttagtcattctcacccatctctacccttccaacctctcctaaatccgcccagctcatcttaaatccagaacctcttctttagtaattattattgtacgtataagcatatgtatgtatgtgtgtatgtatgttccttaatatcatcctatgggttctttatatgttgctcatttagataattgtttagggatgactatttgggactatatgtcctaccaagggcctctccttcactgtcttagtagtcattacttgcctgaagctcttcatctagggacatggttttttaaagcaactatacaattgagatttcatacatgtcatatttagaatacactatctggtagcaaacatcttggccctctggcttttacaatctttcctccctcttttgtgcatttttcctcatttattacatgtagtattttgttgtagctgtacaaaccaactggggctatgcatcccactgcctgtttctctctgcattatgacaagttgtagatttctcggatggtctttgtctgttccaaagcaaacttatttgatgaggggcaaactactcttacttgtgaattcaatgattgtcatttaaagtgcagttaggaattatactgttttgtgacagtggcagtagtggctaccctggagagtcactgacctctaccagctacaggtacttgagtaggtttaaggagctagccatgaaatccctcttatcgagcatgccttcctgtttgatacctgttgattattcccagtgtaaaatctgaagctctgaatctgctaaaggaaagcataggcgtgatgaggtgtaaatgtaggaaaggcatcctgaatagaactccatttgctcagaaataaggtcaaaaattgacaaatggaccatcataaaactaaaaaaagtctgtaaagcaaagcaaaggaaacaattagtccaatgaaggggaaatcccacagggtaagagatatcttttccagctatgtatctgatagaggattaatatctagaatatataaagaactcaataaggaaagcttcaagaactcaaagacccaattaaacattggattgcagatctgaacatagttcttaaaagaagaaataaaactggctaataaatatctttaaaagattttaacaattatagaaggcataactcagactactttgagattttatattgtcccagtcagaatggctaaggtgaagaaattgactaacaacaaaatcctggccagaatgtaagggaaggagaacccttattcactattaataaaattccaaattggtgtcaccactatggacaatagtatgggaaattctcaaaaaaaaaaaaaaagttaaaagtagttcttccacatgacctagctatatgccttcttagtgtatgctccctttatatccttcagagcatcagctgtgcaacccttcctcactcataggcctttggcagacttctttctgggatagtgtagctttgcctcatttccttcttctgctactctatagcctggcccatttccattctcttccagattttctgttgtatctctagtttattatcacagtaggtctccatttcctaggcctcactctctatagtttcatatattcattgtcaaccccaatcttaaaatattgaattgaaatttttagaaataaacaattcataagcttgataatatgtgctaattttgtgaacattatatgaagtctcatgccatttttctccatcctatcttgggtgtgaattagccttttgtctagtatttccatgctatacccactacctgcctgtcagtcacttactagaaacagtcattgcatatatagcagataatagggttctaattctccttatgttcttgctgtcagnnnnnnnnnnnnnnnnnnnncagaacatcagctgtgccaccctttcctcgctcacaggcctttgacagacttctttctgggatagtgtagctttgcctcatttccttcttctgctactctatagcctggtccatttccattctcttccagattttcttttgtatctctagtttattatcacagtaggtctccatttcctaggcctcactctctatagtttcatatattcattgtcaaccccaatcttaaaatattgaattgaaatttttagaaataaacaattcataagcttgataatatgtgctaattttgtgaacattatatgaagtctcatgccatttttctccatcctatcttggatgtgaattagccttttgtctagtatttccatgctatacccactacctgcctgtcagtcacttactagaaacagccattgcataatagcagataataggattctaattctccttatgttcttgctgtcagtggcttcccaagctaagcttctctactctttgctgtgagtgcccataaggacttttagtttggttggttgacagttcatccccctgggcacattgatgggggttctcaaaatgtatggactctgcaagtcacaaactgaagaagaccaaaactgaaaacaatttttaatcaaggaactgttaaagctcacaacaaaaaactcaaaggcagaatgaagtcaagaagtgtgttaaaatagagagtgtattgagctaaagataaaatcccaagcaagagtagatatgagactgtaaaggagaatgaaaggaaaagacatacaagactagaacaagcccatggcaagcttacaggaatcgttctgatgattcttattaccatgcacagcagtcctgtgtggcagtctcagcctttggttccagatcccatacatacatatatgaccttaggtaagtcacttaatctattgatactttagtgataagtgatcttgttaattatgatctatagactcacatgttcttcagttgaaaacataggttatctttgtcacttatcaaagtggccacaaatactcagggtgacatagtgaagttttataaaactacaacataaaagtgtacccatcttcttgggatgggtacacattttttttgtaatggggcaaagttagcatcatatttaaaatccacagcaaataagaaataggctgggggatcatatgnnnnnnnnnnnnnnnnnnnnggttcaaaagaagccaaatgcattctagagtccagaggcaaataggaaggcaaagcctgaggttcaagcatcacaaagagacttatcaaggctcagactctttcaagaatccaaaaacaatctccaaactcatttatctgcttcatgtatagaaataaaaagcagctgatgcctgaaatggaaagagaagccataaatgagtacagtggctgctgggaatgtccaccttttgttctccacaaggagtcagtcgatgcaactaatagatactcccaaatgtgtctttaacccttcatgcccaccatttttcttggacatttgactcaccacatgcgccctaagtcatatctggccacctctccccaaataagccaattcaaagagccaacttaaaaatggaaagcaggaaaagaagatgtgttcaatgtactcactctggaaagaagacaaagagatccagtgaaacccccatgtccagtcctgaacggaaatcaacactgaaacagtgggccaagggtaagtacatctaagtagtcctggtcaaggtgtcaccctgtccaccattgatccatcattgtctagtcttcagtctgaacctgcaaggtggtctgacctgctagtagacctgtgtgaaatctcttttctggagctaagttcccctgatggatggtgcctcttctttcccatagcatgcgatttctagggaaattctcatttctttgggggtccatgttttaacagtccgatagttaggttgtaagtcctaagtgtctcttagtgtatcttcatttctgctagcctggttatagtcacataatatgttcctacgtatttaagatcaatattaaagtgattcttccctcaaaagaattatcctgttaatttttctctttttctatcaacttcttttaaaatttctttttcaggtattctttccatctccatattatatttttttgttttttttttttattttaacttaagctgtattattcactctgaagggctcatttataaaccacatacattataacaacatcagtattctcaagtaatatttgccatatggaggtgactgttccaaaaaacatggtgtcagtgacttgcttctgagatcagctagcatgaggtacaaatctagaaaatagtaggcagagttttctatgaaaactatttatcaaactgttgaaaaatctagtttgctaagatgactgtgaagagtcatggcctgtgaagtactctgtagaaaccgagtgtcacaagtacttcataagcacagccacagataacccctgagccagctagcaagagctctagtacgagcagcacagagaactgggctgtaatcctggcctcagcatgcctgtgacttctgaagtgggctcaactctgagttgagcaattgaggcagctctcaaaggagggggtgactgcaggagtgagtagatcagtgcactcccatagctctcacctccctgctcagcaggtacagggattgatgcctttctccttttgcttctatttgcactaaagggagcagcatccacagttctctggactgatcactggacacataactgcatttttgaaagctgtctccttgaagtccctgttaactgaaatagaatgcgtgcgcgcacgcacacacacacacacacacacacacacacacacacaccatggactgatacaaatttctacaatgggctttcaatcttattctgactttctgttagattacaaaaacatacacgtttccagtttggttttaaaactaacttctggtgaaattaataaattattactttatataacagtctagagttgcttttgccgtgaataatagaagatgaggctgtagatgaggacacagcaccatgattgggcacttgttgtttgcatcttcaggacataggatctcatttgcctctgtccttagtgttttaacacctaatggacatttggaaactgttggctaaatgaacaaatagattaattatgcatttcttgtctgcttcccccaaaagttttaaagcaatttataataaacatatgtgaaacagaacgtttaaactgaggaaagaaaaaattaagaccagagactatatgaggaaaatgaaaatgtatttatacaaaggccaggctgggctgagatcactcaagcactagttgtaactatatgacaaaacaagnnnnnnnnnnnnnnnnnnnntctcccttgtgaggcatcatggtgaatgctgcaatgcaaggaattttattgaggactgcaaatttaataaatgttgaactatctctaggtcagatctagtgcatctcagtcactaccatctgtcaccaggctgcagccaactggcagctggttggtggccattatgaaattcattagtaatttcagttcacttcttaactaatgaacattcccataactgaccattttcttaagtgcttcattctgttcctgtaacctggacactctttctctctgagcagcatggcttctagctttcacttgctacagtactggtaaagtatctttgaactccatttgtgcacatacatgcaatctggaaaggaactgggggataagttttatctatagtttgaagttgaaaatatggttcccaatcatatttgtagagttgggagtatttcaaggataccctttcatgaaaattttagtattgtatacatatattctggtctctgatgaaagaatttctgcagaaggctctgactggaggagaagggaaccttcttcatttacatgtgaggaaatctatcttggattctttcattggccttaagttttgggtttttttgttttgttttgttttgttggttggttggtttctgttgtttggggttttcttcttttcttttttcctttcttttcgtttcttttcttttcttttcttctttgtgtattgaataattccacccatcacaccttgactaaggagagaacttcccttttatgggtgttggtaaacatgtgttttgctaccagtaaattcctctaaataatcatggtaaataatgacaatgtggagaaacattgaacatatcaaagagtgacagccagaaaaacaaggcaagatactcagcacttcaccctagagggctcagttcctccttacactgcagaagggcatcacgggaaggtcatatttttgttctctttttacattgtaaacccacatactcgagtgtggggaggacagaaggaggaagaactggaggagagaatgtgactcggtgagggaacatcttgaatgagctggaaacccagaacaatggaaactcaatggtgatttggttggaagtcaaagtgcaaagggaagtgaaagcagcagaatctctctagcctttccaaggcttcctgggatgacgtcagaagcaagtcacagactcctgtgggctcctgctttctatctctcacttgggaagcatgtcaaagaagaacagtgaacatttggaagctgtctgctttgagatgaacagtatgaactgtcatggtcctgttcacttctttagtcttcttcctgcacaatctatcatgctaatggaggtatgggaaaggcatcaatatgcccagaagctgctggactcnnnnnnnnnnnnnnnnnnnngctcagttcctccttacactgcagaagggcatcacgggaaggtcatatttttgttctctttttacattgtaaacccacatactcgagtgtggggaggacagaaggaggaagaactggaggagagaatgtgactcggtgagggaacatcttgaatgagctggaaacccagaacaatggaaactcaatggtgatttggttggaagtcaaagtgcaaagggaagtgaaagcagcagaatctctctagcctttccaaggcttcctgggatgacgtcagaagcaagtcacagactcctgtgggctcctgctttctatctctcacttgggaagcatgtcaaagaagaacagtgaacatttggaagctgtctgctttgagatgaacagtatgaactgtcatggtcctgttcacttctttagtcttcttcctgcacaatctatcatgctaatggaggtatgggaaaggcatcaatatgcccagaagctgctggactccggttctcaacaattcacatgtagaatgtacctttggatatatctattagttaataagtaatctcagcttatactgaagatgattattttagcaaaaaactagtatcccgagtcccttgtgttttagggtagtctgaaatgaaaaggacgaaacggaataagtaaaaatttgttcacaaaatttaagtgcaatataaatcttgttcatgggtagtttttgaagtggcaatgttgagccttagaaactgtgctgttgagaatttaggtttttgtatatgtgtgtcagtaaatcagcgatcttacaaacgtgtactagggaaatggtattggtgaatgcatttcaggaatatgaatattgcatgtaatgaattgttcatatgcaaaagatattttctcttaatttgaagagaaaatgagcaggaaatgaatgaaacaggaagtactttgtaacagatacaggtcagtcctgaaaccaatcttttaatttcacattctaaatttgtttaacaaaggcagttgagatattttatatcaagctagtaaagattttatattctcacggttacataaatcatggcagatcttctcagcacccatgtttctctgttccaaatggttcaacaaaacctagagccacaagcttctgtcacatggtggggtgtcccatatagtttatcagaactttgtatttaccctcaaagagcttaacatcaacaaggcctgtcctacannnnnnnnnnnnnnnnnnnntataatctgagggtggaatctcagggtcattttattctgcatttccctgattagtaatgatgttgaatatttctttaaggtgcttcttggccattcatgattcctcagttgagaattctttgtttagctctgtaccccatttttaataaaattatttggtttttctggagtctaacttcttgagttctttatatattttggatattagccctctatcagatgcagagttggtaaagatctgtaggttcccaatctgtaggttgccattttgccctgttgacagtgtcctttgcctttcagaagcttttcaattttatgaggtcccatttgtcacttgttgatcttagagcctgagccattggtgttctgttcaagaaattttctcctgttctgatgtgtttgaggctcaaaaaaatttttttaaacaaaagaaaaagatagaaactgataggtcattaaaatgcatttgtatttaaagttagaaaatataaggagtgaaatccttttaaaatgctatctagtctgctgccatgtaagtgaactttggctgtacttgccaatatcataggcaagtaaaatccatgacatgcttatagtatttgatggcaatgttaaatttaacagtggggttctttccttgtctgtgccccacttctatgaacagtgcatcctgagcatgctcgttcttcctaggagttaagcagctggtcttctattcatgcaactttgttagagaaaccctcactgcttagaatgtgctagcagtatcaggaccacctggaatctccttagaaatggaaactcctagcattgtcttgtggggtagaagtctcttaatttttaataaatgaatagaaaacatggggccttcccttttgcctacttgtaaatatgtattgcctgaaactatcctttttgaatcctggcacccaaatgctaccctgtactttcccttcctgtggggctatcttagaactgtattcatttttttaaccttctggcttctggccttctcatctctccttttaaatagcactaaacactcatgttgatgctccgcatactgcagctaggagcatcaagtggttttatgctcttccttcctttcttaagagctttaccaagaacccccaagagcccctttctttccttctctgtcaaatgaatccataagaactttcagtcattagctcatacacctactacctactagagatattctcttcaaaccttgtaattaacactgtgagccaccttcaaatcatgctccgcagcaaactagctgtcattctgtatttccaagaattgctgtgacactgatgaatgtatcagaatctgtnnnnnnnnnnnnnnnnnnnntgtcctttgcctttcagaagcttttcaattttatgaggtcccatttgtcacttgttgatcttagagcctgagccattggtgttctgttcaagaaattttctcctgttctgatgtgtttgaggctcaaaaaatttttttaaacaaaagaaaaagatagaaactgataggtcattaaaatgcatttgtatttaaagttagaaaatataaggagtgaaatccttttaaaatgctatctagtctgctgccatgtaagtgaactttggctgtacttgccaataactcactatcataggcaagtaaaatccatgacatgcttatagtatctgatggcaatgttaaatttaacagtggagttctttccttgtctgtgccccacttctatgaacagtgcatcctgagcatgctcgttcttcctaggagttaagcagctggtcttctattcatgcaactttgttagagaaaccctcactgcttagagtgtgctagcagtatcaggaccacctggaatctccttagaaatggaaactcctagcattgtcttgtggggtagaagtctcttaattttgaataaattaatagaaaatatggggccttcccttttgcctacttgtaaatatgtattgcctgaaactatcctttttgaatcctggcacccaaatgctaccctgtactttcccttcctgtggggctatcctagaactgtattcattttttaaccttctggcttctggccttctcatctctccttttaaatagcactaaacactcatgttgatgctccgcatactgcagctaggagcatcaagtggttttatgctcttccttcctttcttaagagctttaccaagaacccccaagagctcctttctttccttctctgtcaaatgaatccataagaactttcagtcattagctcatacacctaccacctactagagatattctcttcaaaccttgtaattaacactgtgagccaccttcaaatcatgctccgcagcaaactagctgtcattctgtatttccaagaattgctgtgacactgatgaatgtatcagaatctgttcatggagataccaaaatccccctattcttcctgtctcttatagctttcattggtgaagatgccttaaaacaaaacaaaacaaaaccaggtaacacaaaatgctatcgagattcatggaaacagacagcaatctgttgacaaaatagagaattttgtgatcaagaaggcagctagaagaagaaagaatagagttgaggttgagagatttggcaccaatcatttaaaattgttgggtgacttgggcaaattaacgtttcttggcttcagtttcccttttggtaagttagtacccatacaaaagatgaaaaataaagatcatattggatgcatactatatcataaaagcatactaaatattggaagacattaactaatctgtaataatatgcataccatgaggaattaatactttcttacctgtctataaagataacttatgtcctgtatcactcagtggggcctgtgaaatttggagtaagctaaatggaatctgcagcaccacagtggacttgacaggttcatttcttaagggtattatcaaccctggtctgacaactcctgagaggatggcataactgacctctcaggcattgtttggaagagactcatcactggaagcagaagttccattgccaaggaaaaggaagtgccagaaggacagtctctaggaaagtaaagcgggaaacataaacaagatgtgaatgtgcgatggcaggagaaagaggtttgtaagtggagctagtgacaaagcactgtgagagactgaaaagcctgtattgtgtatgtatgctggttggagaggcagctgaaggcccctataatgtcaaatggtgaatactctattagtataaacagaatcctgcaatttttagtatttcctttgttaaatattcattcattaagtcagtaactttttctcaatagaaggatttattggcttaagggatttttttggcctcacatggtatacactcccaagctatatacaaaagtgttgtgtgatttcccagcctatgaacgagaacatggaaagatttttgagaatccaaggtagtgtttacaccacgagccaaagttttccagatataatagggaaagatacacatataaactcatagtgatgtgataacatatataagacctgctcaagctctaggccaacaaagtctaaatagaggtgcaaagatggatatgcaatcccactgatttgatacctgctgagagaggagaaccagttttctttaatgatgtgacccccggtagtttgaccatatactgtcaaaaatagctgggtaacacaaattaagctcaatggagaaagaataagaaaagaagaaaagagaagagaagaaaggaacagagaagagaaaaagaaaatacaagaaagtaaccacaaaattgggagaatgtgatgggaaggtgctaactgtaggagttgggggaagggatgaatatttttttaaaaaatttaagtaataacatgttttgtttaaagtctattattgttgtccattggaaattattcctttgtttataaaatgacataaattcatttttatatgtctaaaacatggttgtcagttttctactctcattttatatgctatagaatttttaaaatatctgccaagaatctgtttgtctgcagagatgaaaccactcccataagaccatttcaaatggaatctacttttacctaggtgagtcccaaagccaggccttttccaatatatggccttatttttcaacaagtaaagtcgttctcactcaaatctttgctttcttttttatgactaatatatctgctagcatatactgtttaatgtagatacatttttcttccaacttggcacccagttaactttgatactaattgtttttttcaagaataaagagcagtaataaacttcttcagagaattcaccttttttttctaattctgaatacatatgtcataaaagtggactattttgttattaaaacagaaagagaatttttcctaatctagaagtgttgcatgtctaaataactatgcaaaaaaataattcctttagttttcttccttaatattaagattgtttcttacataattttgtgtccaacattttgattagtagctttcatcctgttgttaaacaactcagcaaacataatttaaaaatcttaattgttcacctgaacttttttttctacaccatatccaacctctaggcccagcctgatgcaagtatcctgtgctctgatgaatcctggaaagtcttttttgccttaacctactccacttgaaccttacccaaacattggaactagtctaggtctcacaaccaagacactatccctgactggcatacacaacctgcataatgccaaacctccaggtttaggctaggttaacatagccttttgtgtccacaccaaacacacaactggcaaaagaagtccacatgtcccaggtctaatcacaaaaaatcaaggaataagaaaggccaaaaaatatacttgtcaacccaaactgtcagtcctatagttatcttctccagtgagaattacttggatgtaggacacggaacataagagcagtaataaacttcttcagagaattcagtgagtttaaagatggcaaacacctcaatgaacttaacaagaatgaatgtgaggcacagaaatgcctgactgatgcccaagaatacacaagtattaggctgaatgaaatgatgaatacaaccaatctatgatttggaaatcaaatttaaaagagaaatacagaagagatttcaaattgaaataaaagatactcaagggaaaagctgccatgtagaacaaatcaagtagatgatagaatttcaggaccccaaaacagaccagagaaattaaatcacacaagcaaagaatatgaaattttaaaagatgaaacaaatgtacagcaactgcacaaccatgaaaagaatttgaattattcttttaaataagggagagaaatccagattaatagcataaatcagctcatatgtaaaattctacaagaaaatgtctcaattctaaggaaaggcaaatctgtacaaatgcaagaagtgcacagaacatcaaatagataaggccagaaagcaaactcctcatagttaaaacactaaatagatagaacaaagaccactgaagtcagcaaagaaacacgatatgtgacatgaacgaaagcccatgtcagagtggcaggtgatttttcaatggcactctgaaagccagaagaggcaagtgttgtacttcagttcagattgtaaaaaaccacggctactaacctaactgctatgcccaacaaaaataccacagtggaacgataaggaaatgaaaagaattcaggtttatcagctgctgatgaagtctaccagaagccaatcagcaaacatagcagagtatcactaattatgttcagggttggctctctctcccatggcatgagtctcaagttaggccagtcattggttggccattccttcaatctctgctctatctttatccctgtgcatcgtgtagtcaggacaagttttgggtcaaaggttttgtgggtgaggtgatgtccctctctctccatcggaagttttgccttgttcaggctccacttctaggagtctcaacgagagtcatctcctcggactctccggaacttccccatccaagaaacgaagcccatcactgatttctgttctttcccagcgctcttctccatcccacatctaatccttactgctattgttccccttcccactctttctcccacctagttccctccatctgtccattttgtatgtctattttatttccccttctgagtcagagttacacattctcccttggaccctccttagcttagttaggtctgtggatgtagcatggttattctatactttaatggctaatttcgatttatgagtacatactgtgtgtatttttctgggtctgtgttatctcacttaggatgatattttctagttctgttcatctgcctacaaatttcataatgtccttggttttttttttgtttgtttgtttgttttgttttttgtttttttgagacagggtttctctgtgtagccctggctgtcctggaactcactttgtagaccaggctggcctagaactcagaaatctgcctgccacagccacccgaatgctgggattaaaggcatgcaccaccatgcccagccaatgtccttgtttttaataactgggtataaatgtactatatctttaatccatttttcagttgaggtatatctaggttgtttacacttttagctattacaaataaagctgctatgagcatagttgagcaagtagaaacccacagtcaaacaataggcagagctcaaggagtttcatggaagagttgcaggaatgattgacggagctggaggggtcaaggacaccattagagacctacagagtaaacccatgcctatcaataatatctaaatatgaatgaactcaactttttaaacaaaagatacagtgtagctgaatgtattaaaaagcaaaatttaaaaattcaacttacacttaaagacacatatcactttaaattaaaaggataaaagaaagtattctaggcagatgggatcaggaagcaagaaagcaatagtattttaaagtgtgacaaaatagagttccaaataaaactaatcagaagtgataaagtaggacatatcattctaatcaagggaacaattagcctagaatacattaaaatactaaacatctatgtaaccaaacactggtgtaccctgtttcataaatatcacagcactgtaaacaagactcctattaacattaaccctttactagtagatgatttcagtagcctactttctccaataacagaccatctagacaaaaaataattagaaaaaccttagaataaatgatacaatattttaagaatatccacagaatattctactcaaacagtaaacatcatctcactcatcatgacagatgtttctcttttttaatttctaagtggacattaggcattaaagtacagaataaccatgctacatccacagaccccaaaaagctaagtaatatgaagggcccaagggaggatgtgtgaatctcactctgaaggggaaataaaatagacatatgaaatggatggatggagggaactgggtgggagaggtagtgggaaggggaacaagatgcccatcttgggacacaaataaaacttaacaaaatttcttaaaatgaaataattccatgtgtactatttcatcataacacagtaaaacttaaaatataaactcatggagtatatatatatatatatatatatatatatatatatatatatcacgactaaatgatgagtgggataaagaaaaaatcactaatgaaaatcgaaaagaaaatcttgaaactaggtgaaaatgaaaacattacactaaaacctctgggaaacattaaaacagttctatagggaaatttataactcttaagtgcttggttagaaaattcagaaagaacacaaatagatgacttaatgatgcagcccaagatttgaaaaaataagaacacaccaaaatcaaacccagtagattgcaagaaacaataaaacaatcagggcagaaattaatgaaatagaaacaagcaaacaaaaagcagtacaaaaaaaataaaataaaaatgctcaatgaagctaactgctaattcttgagaaggtaaacaagatgaacagctccttggcccacataatgaaaagaaatcaacccagcagaattaacaggatcagaatttaacagagaaacattccagcagacactaagatcattcagagtattacaagagatccctttaaaaatacatctctattatgctgggaaatcagaagaaatgaatgaattatagatttatccattaattaaaatagttaaaccaagaagtgatcaataacctaaagagatccataacaaataaagaaagtataattataaacctaactccataaagccacatgtatttcagcagaatatattgatctttcaaagaagatctacaaccagtaattaatattaaagaaacctgaaagaggagcacttctaagctccttctatgaagccaatatatctctgtaccaaaacaagaaaaatacataaaatgacaacaacaacaacagcaacaataatgaagaactataggtattgtttctgattaacatagatccaaatttctaaataaaatatttgtaaaatgaatagaggcatataatcaaaatacatccactgtgatgaatttggctctgttgtggagaaacgggtaattcatcatatgcagtagtaagtcagataaatgaactgaaagacaaaaatgacataagtagatttgggaaaagcctttgacaaaatctagcagggcttcatgataaaagtcccagaaagagtaggcttgtaaggaacataaagactacatctggctaatccaaagcccacatatcttaaatggagaaagaattaaatgggaacaatcccattaaaatcaggaatgaaaccagactggcctcaattcccatttcttctcaataaagtgttttaagtactagctgaagcaataaagaaaaggaaattaaatgaacacacctaggaaaagaaaatataaaattataattatttataggtgaaatgatgctattcattaagtgatatcaaaaattccactagagaacttaaaagatgtcatcaatcatttcaacaaagtgtcaggatacatagccaccctataaaaatcagtagcctttctataacaccagcaagaaacatgctgagaaatatatcatggacacatgcctattcattgctgcctcaaagaatataacatatataggagccaagaagataaaattcctctataatgaaacctttaaatttctaaagaaagattaaggaagacactagaaaatggaaaatcttcccatggtaaaggactggtaatattagtattgtgagaataaccattctaccagaagcaatttacatattcaaagtaatcccaatcaaaatcttatcaccattcttcatgtaaatagaaaaaagtggaaccacaaaagaccctggacaggcagatcaatcctgaaagagaacaatgcaggagaagttaccattccaggtttaaagatatataacatagctacaatgatattcagactgtatggttgcttttggcatctcctaggatttgaaggtagtccctattgcagaagacaccatgtgcttcaaagaaaggacttggagtatttgagctagatctgaccggaaagtctctttcctgaggactagcttttgtaatactaaaagttgctgtacaaagtgccaatggagagatgcaatgaatagtcctacctaccatgacccacaacaatgacagtttggcatgatatctttcaaggtacaacagtggcattaatatctttgtggcaactgatagctgtcaggttggagttaaggcctgatcattaggagggaaatcatgcctgatactgtaacctaagtcactgcctgttgctagtgaggtcaatgatcctaaggcacttgacacttcaccagcacagttcctaattttattcttaacatttattattatccactggtaagtgtgtctctcaactccatcaaataactttttttttcttttccttttttttttttttttttttttgcctcagatagagacaatttcagaaagctacaattggtccaaattcagaaaacaactgagtatggagtgcccatactcagatcccagctgatatttcttacaactcatcccttacacctcagtctcagggaacactgcagaagaggggtcagaacaattataaaaagcagaggacaagactgccttcgagatatggcacaggagctacatgtataaaatacaatatggcagcctacatgagacctgaactatgataataccagttgacatggcaacattgattcattgatgggggaaatttcacaacgtccctcttcttcatgaaaatcaactaaggactatggcagagggatagttttcccccaaaatgagctcctattggttatccaatatcaatcaggggtcttccctaaatgtatatatatatatatatatatatatatatatacatatatatgtatgtatgtagtaaccttgaaggttatttaagaatataaatgtctacaaatgttgtgcatggatgtcattacttccgctttagacatatagtatcttatgatgatttcattttatttacctagaacaatattttctttttaaattgcttttcattttattttatgtgtataggtgttttgccttcattgatgtcttttcacttcttgcttatttggtctccatggattcctaaagagcatacagactgtataagctactgtggagactgagaaccaaacttgtgtcctctcaaacagcaatctgtacaccttgcccctgagaaatcatttctgccctcaaaatagcttttcttgtattaattttactttatatatttagctggagctaaagaaaaagagattctctgaaagacccacctatggggaagaaactttgaaacttacctgaatacacttaatcactataatataaagcctgagaccacactataagaaccacttcacttgagtgctgatctataggtctcttcatcagaaattgtgcacaatggagattaattggtactgaaggtgttaagtaccaaaatgattgacaatgataacaaaataatttcagcaaaatctatttaatgatatgtgccaagtatgttttgtgtttattgtagaacactgtcctctgaacaaaatggacaccattttcttttttttttttttttttccattttttattaggtatttaactcatttacatttccaatgctataccaaaagtcccccatatccacccacccccactcccctgcccacccactccccctttttggccctggtattcccctgtactggggcaaccattttcatcaaatcagttatggcaggttgcaagggaggatcacaagcaagcctattggctgttgtcattcacttagaaaaggagtgggtggggagggttattctcttcacctgagaatccagctgtttcctcctgcacctcccaaccatttgtatgcaattctgctctaattatatgtgtcctcagggcctctggaggtgtaagagtttgtaaattaaacaaggttaattgaagggtaagggatactccatctgtggtgctatggggatgtcttcttctgtgcaagaagatgactttccagtactgctgcttttgagtccctgacaagctgccctaatttgctttctgttgctatgataaacaccaagatcaaaagtaaccttggccaagaaaggtttattttagcttacacttccaaataacagcttatcctgaagggaattcagggcagagacttgaggcagtaacctggagtcaagaagtgaagcatagactacagaagacttcttactctctttctctttatggctatcactcagctagcattcttatataacccagtaccactgacccaagctggccccactcacagtggattagacctctccatgtcagtcaacaatcaagacgaatctccataagtatggctgcaaaccaatctgacctgggcaatccctcaactaggacaacagagaggcttcaaatgtgccaacaccatctcatgtaattagtgctagatctgaatgatgaaatctcccttccctagtcagctctactcttagaaaagaacggcatcttctgaagtacctgctaaatgttcttcatcatttaatcttgtttctgagtgcttctatgttatagagaaaacacagcatctgaaaattacgccttcataatgagaaaaaaatgagaaaaatgagaaaaaatgaaaaaataaggaaaaaaaaacagtatgtagtagtcattaaaaatcaactatctttcaaatgaaccaaaagaccagaaatagtacacacctgcatttatgtgacacaggaccccataaaggactcatctgttaataggttcaatgatttgcataaattatcactgaagtcctaacaggaaaacagtatttggtttcagatttctactaggtgactggaagtggaaaggctagttctcaaagatttcaacaacagcaggaaagcaacaacattccttggaaacagtctatgtccttgttgctagaatactgggctccactaagtagatgctctacatctcatctgggttggacagtttttccctttttgttcctgactttgtttggagggagggatttatttaaataaggatgttgggattagcttcttgtgcacttcataaaggttgtcttggtaggattcaaatgttggtttctgtacccaagtgctgagtactgtccagacttcggtattgttatttttatgatgtatcacttgtctaggtgttctgtacacattcttatccttcaccttctgattggtctaataaagagttaacagcctatagctgagtcaagagaggaaagacagggcataggggtagggattagaactctgggaaagaaggtcagtcacagaagaagtcagacctatgggaactgaatgagaatgaacagagcatgtgacaaaggtagactagtataaatgagtcattacgttaaacaaactagttgagaacaagcctaagctataaggcttagaattcgtgtgtgtgtgtgtgtgtgtgtgtgtgtgtgtgtgtgtgtgtggcaggtctgacaatctaggtatacaaaaactaagctgagttccgatttatctaggtgtattaatacttcctattaatctatctgggtttatcttaagtgcttgaatatactttcttagggttagtgtaacagttggtgtactgcaaattaagtagctaaaagtaagatacctaaaattctggagtcctagagtcttagcaaagaggaaccacagttgagaatatgcctccattaagttgcctttagacatgcctgttctgacattttcttgtttagagattgatgtggaagggtccagaacattgtgagtgatgcttcacttgggcagatgtttctgagttgtataagaaagcatggctgagcaagccatgaagagcaagccaataagcagcatcccttcctggcctctgcttcatttcctgcctctagatttcatggcaataaaaagcaaattctctgctttgtggcagcatttctctgttctgctttgataaccacatttttgttccttcatctctatacctgtcatcttttcttgcctgtttgttagctgtggaactgaaagtctaactcataacttagggaagtctggcaatctcaaaattccatcccatctgcaaattttgttttctagatatagtaaaatatatgaattccagggattgtaatttcatatgtatacattgacattattaaacatactacaaccaatctaaggtttgattcacagccacacatttacaaacagcactaattagactcaatgggtaaaataataataataacaataatagtagcaataacaataatgatattaaagaggacaggaagttgagaaaaatgtgtttgggagaataggagagggcaatgtgttggttatcttcaagatacattttatacatggataaaatttcaagaaataaataaaaatcattatgaataaaagccaaagatgtctatgataacagaacttagctatgggaagtcttcaggatgaccaagaggaccatgtctataccctgagtgaggacagtgtcgagtgtcattctccagagaaaaagcttgcttgtaatgggaagccacatcatgcagttggaagccagacacatcagattctcagatactggaaggagacaggggtagcagccactgttctggctgcatcattcagacatgacactgccatgaatatccacactgaaaatgtgtctgtaaggcaggttgatgacatatgattaaaattatgagcctctggacacaaaacgtcagctgggaaaacatatgtgtttgagaggagctcgggccttacttttggctgggttcatgcctctcagtctgtttctatgtcctaccatccagtcgctccacaacacagctaattcaatccaaaaatatagatgcataactcagacatttcatgctgataaaatctgtggttgtatccaaaggatcacttggccatagagttatcagtgacctggctcatgcttatcaatattatctctcccacactgagtcatgtggctccttcctaaaatagtttcccttatcgctttccctagagcaaacatgcatttgcctgcagagaacaaagcatttctccactagcataaatgcccaggaaaaccaaaccaacatgtaagatgaaagcacagatttattgaattttagaacaactgcctcagtgcttttaagtcttagaaacattttagttaatcatactattgctattctccctttgaacctgagtaatatttttgaatagttatgtgtacagagggtacattctgcagtatccatgatctttccgtagctgtttcattgccttctggttgcctctttgtcatgtatagattttttagaacggcacatgcaaataagtggcatcttgcttttagtggaagatggtgtaaccctcacaattatcagacatgctgtgatctgaggctggtctactaaattgtgtgtcctgagaacatttcctctgtgatttactaatgataaattattttcctgggttaaacttatattggcctgtgtgaagaattatccacaatgagtcttaaacatatttggcatgcatgaatttactaaaaaaaaattgttatggaagcagatgtggatgctttgtttcatcctgttctccatattcccatggactcactaaagaaagccttcctgtaccaaataaggagatggatgctgtgctgaagttagatcccaacggagatttcttttccatagttttcagcacagtgtcatcaggaggacagatagcacagtgtccataaaactacttacatcttcccatgtctgaccttctaaggctgtatttgtgccaacagaagaaacgacaatttgataatagcaatcagttggaatattcaaaatctccaaggactctttctccttatgtctgcattttacccaggtcaggaacactgggaatttatgatagtggaaaggcatacggaatgcttttgaggcagcataatgtgataaaaaaagactgtaggctctgtcatcaggcagacctttatcacaagtcactttatctctatctgggtcttcatctataaaaaaggcaaacaaaggtgcaaacagacatgaatgcacaaacaggcatgagtatagaagacaagagcagggcatagtgtttcttcatgacaggcatatttttttaaagatttatttatttatttgtatgtataagtgctctatctacatgtacacctgcatgccggaagaggacatcaagtcatattgctaatggttgtgagccaatgtgtggacagccactgagccatctctccatcccagacaaacagagtttttgtatagtcctttcatactctctcataaatgctggcaaaaatgacgactcttgacatgtaaattagctctgctcacttagagttcacatacttaaaatgtagtttttttcatgtatgttttggtcctgttcaccatcctttctccttctcatgttctgttgttgtggtctttatcatccctgaagaccttggcagatggtataccttgcagccatccacattagcgtggtggtttattgactaatagacgaatattggtgaaaaaataacttctatgatttctaaaaatggctcttttgtttaaaaaagttagatgacttctacctctcagcctagatttccaaattcttggccagaatcttgctgtggggaagagggctaagtccactgagaaagatgatacatttacaacctcctgacctgttcttagaatgaataaaacttgactttcccacagggcaactggagaatgcttaagaattaagaaatcctatggttctttcaaagtgaagacagcacgggcagtcaccctatggaccacctcttggcaagttgccccttacagggctttgcaggcccctgtgctggggagaaggaagagtttctcaactttcaccatagtttgtagcaaccggttctaaggagaattgaattaaggttacaaatctggacttttaatatcctgactttaaagttcataaatcacttttataatcactggattctattgtatttcctattttatttaatagttgttattcttcttacttcctgggttaattaatcttggaaaagattgaagtaccaaattaggcctcaaaaatgtagcttagagcgacgtatctggaaatcttctgggtctgagagtattgaggatggcattagacgatctgctgctctaagtagactttgaaaacagtattcactgacaccagcatcggctctagctagtgccttcgagctctatcttcaagggacaaaagacacagagacaggtgcggttgacgtggctcagcggttagaggacccacctatagaaaactcaaagctgcattcctagaagagcagtcactcagtcactcagttaaggagacagaacaaaaatctgcaagcccatgttacatgagaggtcaagtaaatgattcaagttgaagtttgcacacagcaaagccagcaccagtaattaggtagagagaaagcaaatttaaaacctgcattgaaaactaaagtaggaaacagtgggcaatctggactttttctcttgtaggaaagatataaacagaaaatctcccatgagatggtcttgctccaacccagttgttctacatataggaatcaactcaacttgggattcaaaaaaagccaaatagcaatttaaatatattgtgattctattttgatggtagcccaagtacttggagaaaaagtatgaagcaccacagggaaagtcactctacactatgcaaactgaagtatatgaagcacagtgagaaaggatccatgggtaggtatggacctccataaattcatttgaatttagaaacagagatggagagacatattgagcagtcccatctatgcgtgtctgacatacatctaatgtgaagttgctggagaatatacagaagataattaaaacatttgaacatagttaggaattcattgtatagccctggctgtcctggaactcactttgttgaccaggctggcctctaactcagaaatccgcctgcctctgcctcccaagtgctgtgattaaaggcgtgcgacaccacgcccagcctctattcctctattctatgactgtgggcattcatttctgtgtttgctaggccccggcatagtctcacgagagacagctatatctgggtcctttcagcaaaatcttgctagtgtatgcaatggtgtcagcgtttggaggctgattatgggatggatccctggatatgggagtctctagatggtccatcctttcgtctcagctccaaactgtgtctctgtaactccttccatgggtgtttttattaaaagaaaatcagtaaacaagacaaggataagtgtggtgccatggttttggttttgagtgaggtccgtgagggtagtggggatgaggttaccacagctgcctctgcctttcagaaagcacaagtgtcactgctggctacaactcaaagtactagctactaggcaagttcatgtttcacaggaatcannnnnnnnnnnnnnnnnnnnnnnnnnnnnnnnnnnnnnnnnnnnnnnnnnnnnnnnnnnnnnnnnnnnnnnnnnnnnnnnnnnnnnnnnnnnnnnnnnnnnnnnnnnnnnnnnnnnnnnnnnnnnnnnnnnnnnnnnnnnnnnnnnnnnnnnnnnnnnnnnnnnnnnnnnnnnnnnnnnnnnnnnnnnnnnnnnnnnnnnnnnnnnnnnnnnnnnnnnnnnnnnnnnnnnnnnnnnnnnnnnnnnnnnnnnnnnnnnnnnnnnnnnnnnnnnnnnnnnnnnnnnnnnnnnnnnnnnnnnnnnnnnnnnnnnnnnnnnnnnnnnnnnnnnnnnnnnnnnnnnnnnnnnnnnnnnnnnnnnnnnnnnnnnnnnnnnnnnnnnnnnnnnnnnnnntcttggtgtgtgtgtgttactggaatcaaaccccagggctaatcacattgagagttaactcttctaccaactcttctaccatgttccatgcataactttcaatgcctatcaaagtagatttttggataaatatcattatgcacaaaaagcaaatcccaagatgcaatgaattaaataaaacacaaagtatgatgatgagaaacctgtttttcttctaagattcaagaggttaaactttactcaatgtgactacactattagaaagcaattgtggttatttttgaaggaaataaaaatatcatttgtcttgtaatttatgtctattttttcaaacaattatgaagttattaggacataaattcatattaataaatgcatttttactttattacttaataaacaaaacaaaattactttaaaaacaaaactaaactaaacattttcctttttgcctaaggatagtgtaaaaaacttttttcaagacgctaagaattctaggaatcaaaactttctggaggcatctgtcacataatttagcagggaataacaagatatgcaccggtcagtttctattttgataagtctgtgtgagggctggtattagttctcagcttggcacaagataaagtcacagggattaaactccaagaaggggtttttagattaagttggcctattggcatgctttggtgggggttgtcttgattatggtaactgaggtgggaacactaggccactgaatgtcaccacacatgggaagaaccatggactacataagagctgtgtgcattgcttgaccacgttctggagttgactgtggatgcaatgtgactgatttcttcaagttcaggctgctgggattttccccgcaatgatggactataaccttgagttctaaatgcagtaaattcattgttccttaacgtgcttttgctgaggcatgtcattctggcaacagaaaagtaactaagtcaagttagaatttctcaaggaaaaaggttaataaaaggacaaagtccatatcttctaaaggtgggaaaccaatgtcaagcatgaatacttttttggtagaaccaaaaaagggagggggcattgaatacaatattaaaatgagttaaaacttatcaataatgccaattcatgcaaattctataaaaatactttaattaaaggatacagatatggttaaataaatacctgagttagtatgcaaattaaaatttaacaataaaattttaattaattagaacttggaaatttgtgaataatgggcaataatgttaggataatgtatttgacaacttcatgggccgttagaaattctgtaacatttgtgttttaaaacttaattaaattaaaaactttaaaactgttgtatgcatggggtgtgaagcatgccctgcatgtgtggaagtcacaggttaactcacatattctggtggctttccttctgtcatgtgggacaccgggaactaacttaggccatcagaacagcccagtctactaaaagaaactttttcaggaacaaaatggaatttactatgaactgtggttaagtgttaattcagttgctcaaagctatttagaggccaccccaagagtgcacttttcttcacaacttctcaatcacagtgaaataacagcatgccaaacaatgagtactaaaattattgttacaattgctttattggtctatatttattttacagaatattaggtttcataaagttagttacgtttaagtctatattttgacatactctttttaatattattttactatttaaaacaaattttatatttaaatgtatttgatcatgtgcttcccctcccccaagtccttccagatcctctctccatccctacccacccaactttaagttctttctaaaaaacagagaaaagccaaaacaacaacaaaatcccttaaaaccaagaaaatataaagacacacacacacacacacacaccaaaaagcatagaattataatcaaataaaagcactcacaaaaaactgtgaagttcactttatgtcggtcagttacttttgaacatgaggcctatcctgcagtgtttgagacatccagtatcactctattggaaaaacctggttctccctcttctagcaggtatgggagctcacttgttaaccttgaccctagtggttttctctcactcattcatttttttaaaatataacaaaataaaatataataagacaaattagaaattatcaaatcaaagttagacaagacaaaccaacagaaggagaagagcctcagagaaggcacaggaatcagagatatacttgtttgcacacttgggaatctcatataacctggaagccatacaaacacacacacacacacacacacacacacacacacacacacacacacacacacacacacacgaggacctggtgccagaaccatggtggcacatactctcttcattctgtggcctttctttcatttctctctctcttttttcgtctcttccatgactagtctcatagcctcctccaattttgttgctgctttaatatcatttacatacattaatggttttgtgtatttataaaatcctaggatctacaaatgagagaaaacctgtgacatttgtctttctcactcaggaaactcttctctacttgtatccattttctagcaaatgacgtaattttcattctactcaaggcaactcagttatgtacatacacaatattctatttatctgttcatgtgtgaacaaccattttgcttaaccccatttacagttgttgtggataatgtattgcagtagacatggagatgcaggtatctctgtgatattggtttatagtcctttggtatatatatatatatatatatatatatatatatatatatatatatatatatccacaagtagagctaggtgctgtagtaattttgaggtttttgaggatgctccattctggtttctggtacagacagactaatttatattcccagcaactatgtaccagtatcttctttcctcacatccttaccaacatctgctgctatttgttttagaatagccattctaatagagctaagatggatggaacctcacttcagttttgatttacatttgatgttgaacattttttgtatgctcttggcaatttgtacttcatctttttagaaatatctgtttattctattaacacatttactaagtgtgttgtttggtttgggggcatttagaatattttagtttattaaatagtactttacctatatcctagtctctcatccatttaactgtactgggtaagagctagatctagtttggtttgttcaaaattgggcatccagtttcctcagtaccagttggtggaaacctgtatcttctctaatgtgttcttgcagcatctttgtccaaatcagatagttcctgtagtgtgggtttaattgtggctcttctggtttgttccattgctctttgagcatatttgttgtgctatcatcatgctattttcattataatggctctgtactattacttgaagtcaggtatgaggacaccctaagcagtacacgaactagaggggtttgtgaccactaagtcactagcacagattgctggaggaaccctaggtactgtgaagatagatagacccatatgtgcagctatgtcaaagactaaaccacacccagatactaaaataagtggggattaagaaggagctaaatatcatgatagcaaaaaataatcacagaaattaatatctaccttttaacaataactgcaaatgtcaatgttctcaatcttccaattaacaaacacaattccaaactagcagatgggattaacaggactcatctctctgtcacatatggaggaaaagaatacttaattgttaaaaaccttctcagtgattaaacaccagacaatttaagaatagtttccactagctattgaagtcctccacaagtgaattcagaaagcagggaaagaaaggctccttgcacagtttgtaaataaaatttctcttggtacagaaaagactgcatattaatataatgcctgaaaataacaaaaaaagaaaacagaaaaaagaaacaaagaaaaaaacaaaccaagaacaacaacaaaaaaaaacagcaaaaaaaaaaaaaaaagatcaaacagaactttaaaaaatcactttgttcttgaaacatgtttgtataaatataagaggattatttcctcatgttaacaaattagtgaagaggtgaagacttctatgactccctcaatagatttgttaaaagtactcactaaagtgaaagcttgcaggcagttcctcatcaaagtagaaaaagattctgaacttgatgaggtgtgattatattaatttggtagaagtacaccctttttgaaatatgatacatgtattctttaaaagcagaaaaggagccaggcgtgctggcgcacaccttgaatcgcaacacttggtaggcagggacaggccgatttctgagttcgaggccagcctggtctacagagtgagttccaggacagccagagctattcagagaaaccctgtctagaaaaaaaaaacaacaaccaaaaaaacccaaacaaatgaacaaacaaaaaaagcaggaaaggaaacatgcattctactaatgccacactcactcattgataacattagttgccatatctggaattaaattctgtatgaggagccaaataaaaataggaataattagaagaaaatacaaaactaattttgtaagaatattattgattttacagaaaactcgagaagtgtattaacatattattgttaggaatttttgccatattttaaaaaactatttaaaaaattaatttcatcagcaaaagcccgaaaaattgaaatacaaaagtttaacttcttcccaagcagctacaatgtacttctaaggcacctaatggaaaaatatacaaagcttttattaaaaatactaacactttataaaatattaaggatgacttaaataaatggaaattgctaaagtaaatgtttaatgggagtaagataatatggtaagaatattctttctgcccgatagggatttcctggacttggataagcaaactttgagatttatagagaagagttaggggccaagaacccctcaggacaaaggataagtcaggggcaggtcatagatcttgccaaatgtaacactgagactcactgcaaagccacagtaatttagtcattgtggacctggcaggaaagtcatagaccaacaagccagaaataagcccatcacagaatgactgatagatagcaggattggtgctagagtcactgagaggaaaggctgctcaggaatcactcagagaaaaggaaaatccaactctctatcataccaaattaaatggaaattcatatgcagcggttaagacataatacagaggttcaacataccattaatgccatttctccaatgacaacatcatgtgaaatcatcctgtaacatcagggccagcatattagtcaagacaaagaccatttcaccacttgcaaggtttccttgttgcttttttaatagctgtagagcccctctccccgctttccagcactctcaactctctcccaaattctccatgtttagatttgtcatcattgaatgctatggaaatgggtcccttactataaaaccacctcaaactggcttttctctcttatatgaccctctaaagagtcatgtaggtttttgtgtaaatttgtttgttcctttttactgctaagaattactccatattgtggaatatttgccaaagacatctctatgtttctaattttgattattacagaaaactactatgaatattcatgtgtagattttatatgaatataattttttcatacatgttcaacaatatagatgctggcttataggcttagaattctcaaaacctactttagttagagttcttaaatgtttcaatctccattttagcccattgacaagaggtagcagaaaaagatgcttaataagacaacgagtatatggacttttttagacatagatcaatgggggattccaatctccattgtcaggatatcagcagtctagtccaaaatatcaaacacagtcagtggtggcagtccagttcaattggcaaacaacaaacacgaatcagtagcagcggtatgatccagaagaaatcttgactgctgaatccacatgagtctgaagaagttgcaagaagcatccagaatactacggggagttctttggtgcttttctttctaagaagtcataacaagcaaagatcagcaaagctcagcaaaacattgcaagatgaaccaatggaagaagatcttctcactgttggtggggttatatttatactcattctaaacatcatgtgccctctcaggggtcagctccagcaaagcatcatctaccttctttgttaaagccatctgtttcaacagcattctctcatgtgtctccttcagcaaaacatgctcttacaagacagcttccaggaaaacatcacatggcacaagggagtctccacgtaaaccaaaaatttcctcctcactggttctatgcatatatgtgtatatatcatttatctatctagtcatctatatctatctatctatctatctatctatctatctatctatctatctatctatctcgcatccactatctatctatttttggaaactatctgttttccagaggagccatatcattttacatttttaccagggatgtctcctttccagaaatgaacataattattgaaaaatttagatctatttttgcgtttgtcattatagacatatcacattctcagcttaatccatactttctaataatcaatgacagtaacttctcatgtccttcctttcccatctcttgtaacctcttgcttatgacctagaaatattatctagttagaccgtaattttttttactgtaatgagttgtttacatttatttatacaaaaacacacacatacataatcatgaatgtatgtaacaacaattaatgaaaaaagatgcaataaatttgaaaaagagcaagagagggtatatggaagagttttgtgggaagaaagagaagtaaaatgatgtaattataatcccaaataaaggaaataataaaaattattatatttttatttttaatttcaagtccatacccattgagatagatatagtttcctacacagggaattatgtgcacccagaaaccacagataatcaaataatagtttgttccaggtatgggatatttccccttgaattgttggtcataagttttttagagactctcagaacaatagagaatattcccattactcttgtcttcccacaagaacttgatggtaagactattgctgaagataacacaatcattggtcacgatgtggaaaacttgactcgacactaaccagagctttctccctaatctctcgcttttgtagtactaaaaggtgctatgtaggctaatagatgtgaggacttgagtgtgaattgtcaatactattacccaggtttgaatcctgtgattctaataatgacttgcatggcataatgacccatgtgtgcaatagaggcaagaatattgtgcatgtaaccaactggtttgtgattggctttgtggcctactccacaggaagaaatacatgcctaagctatacttctggccatgaacccatgattggtgggtgccgcagatgagcctcacttgggtcctccatccatgggcaaaactcaggttcggttataggtgggcaaagagtcagtgaaagtggggtgacaaacagacctgacacaagggagtgtgaatctgaatgtaatttgttaaatcaagcatcaaactttttatacagaagaaaacagggaagttgggtggaaggtacaaagaagttactggattcttacacaaagaggaatgcaaacagggaaggactggcaggaaccaactgggataaaatccaatgttaacaactgggatcaaaatcagctccacctaaggtccacttaatcttagaagccaggggcaagggcttcgtgcccttgccatagttcctactctagtctattgtatagtccaccttacccctaggccattgtaaatacttgtttgtgtatgggtgtaactcataactaacttcctatagttctaagtatctactctggttcctccttaggtcacaaacttccttcttcctagataatggtaaatttctgtgtagggcagtgatttagctatccatgcccaaggtcagattaaggactgcctagactctaatttagctatatgtcaaaatatcaatccttaggagcacttgtaataaagcaatattaagggaaagcacagagatccgtttaccaactaaagcaaagacattggagcattctttatactccacggatgccatggttccaggagactaagtttccatgaacttttcgccttggaacagtgctcaggttttcagggcctgttgcttgtcactactggagtagatatagcaggtgggctcagaggcctcagggaaaaatcctcaactggtattctgtaatttgatgtcgtattaaagtgctctgtaaatgtatctctccatattcaaagaatagtgcagctctcagatcttatcagataaatttctttgtgcaatggatattggttaaagcagaaacacatacttagtgaaagatccaagagtaagtttcaatagagtgcttagtcataaatggcattactatatcacagctctccccaagactcaaggaccatcacagataagagaatggcagaactgtgagatcaaggcctggaaagtaacagtatagttctgaaaaaacagaactgctaaacttaggaactcagtggttgctgcccactgtatggcagtttcttccaagattaagaccttactacaagttggaaggaagcttgttaaagcataggatagttaaagggaggtaaatcaacaaaatattttaagatagagttctaaagggtagagaaatcagactattctgtggcataggcttgctaaaacagaatgtttatagggacataaaatgaaacaatgatctgaggtgtaataaagcactccatcttgcaaatctccttcctctggggaagtaaatttaactgaatggcttcaggaagtccctgaaactgaccaaatttactagattccttcctctccatagaaatgataagggccacgagaagataatcttagacaaatggctgcctggaagaagcagagactgcgtgaaaagaacagaaaccagctgagctctctgtgaagaacattttctaaatgttgagctgcctgctggttgtggagtgcgctcctgatttctagattttgagatatgtcatccgtgttgggtatggcccagagcgagatttatatcctctcccccagattttcaagggccagccagagcgacactttccaaggcacaggccctctcggatttggtggtgcagctcttttccagttccttttgttccatacataacttcccatgcacattcctacaattactcttgaagacctcattggttcatgatgttggatttgcatggtatctgtttatctattattggttctcttctgaggtcagcagacatttgcttatctctcttagaaataatgtcacataagacctgcaccaagtcaagccagccaatgttctcgaatgcaaaagggagtatgggccccacttctaaattgaggaactatacccagttgatgtcttgaagaggagtgagggtcaattttctttaagagtatgatttttggtaggttgaccataattgagtgaatggtcttacaccagggatacagggacagcacaaataggtgttgatgagttgtgaaataataataactggacacaaagttgtagagtaggaggttggctttagtctagaaacaggtggggtgcatgtgatagtaataacattttaagaaacaaaagaactttaggttgaggtttcttatttttgttttgttttgtcttgctaattgctcagttccactgttaaaaacaagttgtgtctggtttatttgtgtctttggcaagaattgtttagagatgcttttagggatttctttttgagttctctactctgctctcttagtttccatcagcagtctgctctgctaatgccatttcctcttagtccccacagtagaacatctatgtaagtatagcacatctacatattcagtctcattttattgttattttcaatattgtaacacaaggtttgagtctagcatttttcatatagattcttgaagaaaaacaaatttttaactacaaaaatgtgagtcttcacaaaaaacacattaaacctctacattttgggttatctatgccgtgtagagtatcctgacctggtcattgggagaacagatttgagaggctggttttcagatggcatacaatctaaagccaggacataagtcaagtgtacaattatatgtcttttaagttaggataaatgacaatgttctattttaatgacaaaaatgatggaccaggtattagatctatcttgtactttataaattacaaaatgataatagttgtgttcaatttatatctgagataaaagaatcttttaagtaggaagaaaggggacagtgttgtggatatccctggggttgcttgtattttgatcccaattctgctctcctgggaggggttgcaaatgaggaaccagtcatgtactctgctgacttcttgtgaaccacccactaatgaataaaggagccaatcactgggtgagtaagtgggacttctgagttggatagaggaagagaggaagcaggcgagagttagggtttttttggaccatgatagcatgaggacaagacgtagctccaggtgtctcctggtttcaatggcagatccaccaagattcaccatcagaggatttagatttaataaagcttacttgggattttgctgcacacagcgactgagttactgtcatttctgaactaagtttttgttgtgttttccttcacattgtggcttgtctgggttaaagaaagaaaggtacagaggcaaggcatgggtttgcnnnnnnnnnnnnnnnnnnnnnnnnnnnnnnnnnnnnnnnnnnnnnnnnnnnnnnnnnnnnnnnnnnnnnnnnnnnnnnnnnnnnnnnnnnnnnnnnnnnnnnnnnnnnnnnnnnnnnnnnnnnnnnnnnnnnnnnnnnnnnnnnnnnnnnnnnnnnnnnnnnnnnnnnnnnnnnnnnnnnnnnnnnnnnnnnnnnnnnnnnnnnnnnnnnnnnnnnnnnnnnnnnnnnnnnnnnnnnnnnnnnnnnnnnnnnnnnnnnnnnnnnnnnnnnnnnnnnnnnnnnnnnnnnnnnnnnnnnnnnnnnnnnnnnnnnnnnnnnnnnnnnnnnnnnnnnnnnnnnnnnnnnnnnnnnnnnnnnnnnnnnnnnnnnnnnnnnnnnnnnnnnnnnnnnnnnnnnnnnnnnnnnnnnnnnnnnnnnnnnnnnnnnnnnnnnnnnnnnnnnnnnnnnnnnnnnnnnnnnnnnnnnnnnnnnnnnnnnnnnnnnnnnnnnnnnnnnnnnnnnnnnnnnnnnnnnnnnnnnnnnnnnnnnnnnnnnnnnnnnnnnnnnnnnnnnnnnnnnnnnnnnnnnnnnnnnnnnnnnnnnnnnnnnnnnnnnnnnnnnnnnnnnnnnnnnnnnnnnnnnnnnnnnnnnnnnnnnnnnnnnnnnnnnnnnnnnnnnnnnnnnnnnnnnnnnnnnnnnnnnnnnnnnnnnnnnnnnnnnnnnnnnnnnnnnnnnnnnnnnnnnnnnnnnnnnnnnnnnnnnnnnnnnnnnnnnnnnnnnnnnnnnnnnnnnnnnnnnnnnnnnnnnnnnnnnnnnnnnnnnnnnnnnnnnnnnnnnnnnnnnnnnnnnnnnnnnnnnnnnnnnnnnnnnnnnnnnnnnnnnnnnnnnnnnnnnnnnnnnnnnnnnnnnnnnnnnnnnnnnnnnnnnnnnnnnnnnnnnnnnnnnnnnnnnnnnnnnnnnnnnnnnnnnnnnnnnnnnnnnnnnnnnnnnnnnnnnnnnnnnnnnnnnnnnnnnnnnnnnnnnnnnnnnnnnnnnnnnnnnnnnnnnnnnnnnnnnnnnnnnnntgctgggtctacttttactatgtcctgcaacagtgagaatgacacaaggtgtgcctctttctttctttctttctttctttctttctttctttctttctttctttctttctttctttctttctttctttcaagagaattttacataaacaaaaggcagattcagtctattatagttaccacactataaattaagggtggcaatgcagttgagaatacatacaaattatagacatataacatggtagcatttcagctttccaacaattagtacatagagaagctgtatgttggtgactgatcacaggtctatcatttctttaagtaaggtcatgtcttgattaaattttttattagatattttcttcatttacatttcaaatgctatcccccttcctagtttcctctccgaaaatcccttatagcctcccccgctcccgtctctatgtgttgaagtcttccttgatttatttttaatcagtactttttagattctagcttgctcaatctgtattgttatggttaaattttagtacttaatttctttatagtgatattagctttagtacttttgttcattctcttttctcttttcttgatttttgatctttacttttctgtaaattgggtattgtatccctaagaggcaagcctttctgccactgtgcctcagattttcatgtgctgggttctaggatgcaccatgaccattaacttgtatctatattgtttatcaagtcagagcaatttccttccaccactaactcttctctcagctgttatggaactcatcaacttttaaacatttccaaggaaatttagaatatccttgttatctaagcatagggaagaatttcaaaataaataaaagctgcagaacatattacaaaggtcagtaaattgagaatgatggaacagggaattttgtttagccaaacatatcacaaagagaatgagaaataaagccgtattttcatttctattattttttatgttacaataagaaatgcatatcccaaatatgtgaactttgaaatttcaataccaaaaatcagttaaggcactgagaaagggtgcaaatgaattgggtaagtatttaattataaaaacaatacttaactttttatgcattctcagttggctgtgggttcatgagcttcaccaccctttcattactgaatgctgacagatccaatattgtgcagatctgtttatatacaaccttaaggcaactcattgggatatcaataaaggaaaaaaaaattaaaaaaaatgaatacagaaagaagcctaattgggaaaagaaaagatcatcaggagtgggaagaagaaaacaaagagtaacaaagtgaatagataaaaatccgtggtataataagtatatctaagaatgtcacaatgaaacacatggacaatatataacaataaaaagtacaaaatcatggtatacttattcagcaccatactttacaataatggccatgattagctctcagctatatacttcaaaatagttaaatcatagaaatactatcaagaaaaaaagcaagtcatatatccagaagaggccccaactggtaagaaggacacatgctccactatgttcatagcagccttatttataatagccagaagctggaaagaacctagatgcccctcaacagaggaatggatacagaaaatgcggtacatctacacaatggagtactactcagctattaaaaagaatgaatttatgaaattcctagccaaatggatggacctggagggcatcatcctgagtgaggtaacacattcacaaagaaactcacacaatatgtactcactgataagtggatattagccccaaacctaggatacccaagatataagatataatttgctaaacacatgaaactcaagaagaatgaagactgaagtgtggacactatgcccctccttagatttgggaacaaaacacccatggaaggagttacagagacaaagtttggagctgagatgaaaggatggaccatgtagagactgccatatccagggatccaccccataatcagcatccaaacgctgacaccattgcatacactagcaagattttattgaaaggacccagatgtagctgtctcttgtgagactatgccggggcctagcaaacacagaagtggatgctcacagtcagctaatggatggatcatagggctcccaatggaggagctagagaaagtagccaaggagctaaagggatctgcaaccctataggtggaacaacattatgaactaaccagtaccccggagctcttgactctagctgcatatatatcaaaagatggcctagtcggccatcactggaattagaggcccattggacttgcaaactttatatgccccagtacaggggaacaccagggccaaaaagggggagtgggtgggcaggggagtgggggtgggtggatatgggggacttttggtatagcattggaaatgtaaatgagttaaatacctaataaaaaatggaaaaaaaaaaaataaaaactatgtctataaaaggggaaaaaaaaannnnnnnnnnnnnnnnnnnnaaaggcagattcagtctattatagttaccacactataattaagggtggcaatgcagttgagaatacatacaaattatagacatataacattgtagcatttcagctttccaacaattagtacatagagaagctgtatgttggtgactgatcacaggtctatcatttctgtaagtaaggtcatgtcttgattaaatttttcattagatattttcttcatttacatttcaaatgctatcccccttcctagtttcctctccgaaaatcccttatagcctcccccgctcccatttctatgtgttgaagtcttccttgatttatttttaatcagtaccttttagattctagcttgctcaatctgtattgttatggttaaattttagtacttaatttctttatagtgatattagctttagtacttttgttcattctcttttctattttcttgatttttgatctttacttttctgtaaattgggtattgtatccctaagaggcaagcctttctgccaccgtgcctcagattttcatgtgctgggttctaagatgcaccatgaccattaacttgtatctatattgtttatcaagtcagagaaatttccttccaccactaactcttctctcagctgttagggaactcatcaacttttaaacatttccaaggaaatttagaatatccttgttatctaagcatagggaagaatttcaaaataaataaaaactgcagaacatattacaaaggtcagtaaattgagaatgatggagcagggaattttgtttagccaaacatatcacaaaatgaatgagaaataaagccgtattttcatttctactattttttatgttaccataagaaatgcatatcccaaatatgtgaactttgaaatttcaataccaaaaaacagttaaggcactgagaaagggtgcaaatgaattgggtaagtatttaattataaagacaatacttaactttttatgcattctcagttggctgtgggttcatgagcttcaccaccctttcattactgaatgctgacagatccaatattgtgcagatctgtttatatacaaccttaaggcaactcattgggatatcaataaaggaaaaaaaaaagatttaaaaaaaatgaaaacagaaagaagcctaattgggaaaagaaaagatcaacaggagtgggaagaagaaaacaaagagtaacaaagtgaatagataaaaatccatgatataataagtatatctaagattgtcacaatgaaacacatggacaatatataacaataaaaagtacaaaatcatggtatacttattcagcaccatactttacaataatggccatgattagctctcagctatatacttcaaaatagttagatcatagaaatactatcaagaaaaaagcaagttagagaatatatatgcatataagtggtaagttaactaaatatttcattgttaaaagtatatagatatgtgacactataaaagtaagaaattcagctgactgattatttgggattttatctgggtctgagcattgtgatggtttctatatgcttggcccagagagtggcacttttacaaggtgtggccctgttggagtagttgtggtcctgttggagtaggtgtgtcactgtgggtatggtctttaagacccacatcctagctgcctggaagcaagtattctgctagaatacatcagattaatatgtagaattctcagctctgcctgcaccatgcttgtctagatgctgccatgatcccattttgatgataatagactgaatctctgaacctgtaagccaacctgaaatatatgttgtcctttataagacttgccttggtcttggtgtctattcacagcagtaaaaccctaactaagacaagcatacttggggcattaatcctgttaaaaatattactttcttattctggtattaggtgaatacatgctcattgtatcagcagttcttgaactatgtatatatatatatatatatatacatatatatatatacatatatatatatataatgcttaatgtatgacttaaagtatgatatgtgtgtgtgtgtgtgtgtgtgtatatatatgttctaactacatgtatatatgtgtatgttcctggtgcctatggaggccagaagaaggaatcggattacctggaactggaattacagaaatttgtgagctactgtatggattctgggaattggaccagtgtcctctgtaggaacagcatgaattcataactgatgagccatctcttcaaccccagaattatgaggttttcacattaaagtatgaaaggcttgtatgtattaacttgaaaataggatttagttatcaaaattgagccaaaggggaagttgactgtgatcaatacatgttttgtgtaactcttagtgaactaataaaaattttaaaatagtagggaaactaagaagagaagagaaaagaaaagaagagaaaagaaagagcaaaaaaaccagagaaaagcaaattgagtcaaataataaagctctgaacaccagcttttaaagctaatctccattgtctaggcagagctgggggcttacccactttttgtttcatggcttcatgttatttctatattttctgtggcaagttttttttttataacaattgaactaacttcttggctatatctatcataaattttgcagtgcttatggaacttctcatatgctatttcaaaattattctccttttacactagaatgattaaattgctaacgttgatgctatatgtgaatgatctcaacctgaaattcataatgttccaaaaccgagtgctttgataccacaaatggaaattttcatcttataatatgggttgcatcataatataagtccactaggaaaacatcctataaaattagctttcaactagaatataaagtatagatggaacataagttatatggtatacttaagtgtgtatcctttccaaaatcttattatgtgtgtataactattccagcattggaaaaatcccttctgtcataagcatttcatataaggactgtttgattttaatgataaatgagagtaatgtaatccttttgttttctgagatactattgcacgttttgttttgttttttttgttttttgttttttgtttttgtttattttctaaatttttttgaatttttctgattttactgaatggtttttgttttgtttttatttttttctgaattttcctaatgaagtagattgataatgatgttcttcaggtttggtaaacatgttttatggtatgaatggagtgtcccttgttgttgattattaggtcactctgaacattttctagtcaggtatgacttcgtcccttccagcccttctcagcatgatccctggaatgtcttcccatgcttgtttgcaagatagcccttgaggttacctagaagtgctaactgaaggcattataatgcaaccctggaattaactggataatattagtttcttttgggttttataatttggtagggttgttatttaactatttttagcaaactctagatttccctagacacaaagtccttccacaatacgtgccagggccataactatcatgtcaattaattcctacagatgcaatagagaaattaataccctttcatatagtggggattctgagcctcagagttcttcagtgctttgccccagatcaatggctggatctgtccccctcacattttgggtgcaattccttcccactgcacagcttttgagttgtgccagggtgttctttgcttcctatgagggaacagtttaatgtattgatttattgtgcctcctgatgccaagcaattgctttagcttcattgctcctctcaactgacttgattttacagaattgtccacactgcacagttattctcatggcaaatcaaattatgcttctccagttttttccctttgactgactatccgaatgctaagagcctcctaaatgactagcattagacatacttaattacagtccaagatcaactggcaattgcttgtgaaaacttgggtcagtattcactttctttaagccaccattatcttatcattgaagagaagatactactttgggccttgtcttgtcaatcaatagatttaatgaaacatgtttggttcataatataatgagtggtcttaaatgagttttgttatagctgctgacattgcattaattatggctgttgttggctataatatttaattgcagtgttatttctgttgaatgaccttcactgacctctatgacaggagtcacattgtgttaaaacaggaagaattaaatttttgcttctcactggacattgttccttcctcgtggagctttttttatgttctagattggcttaaggcctttgttttctatctcctctcttataattacaaattttggtaaaactcattgattattattgcctgccccttccttgtgccccacatatcagagttgtgtggagtttgttgaattaagtgaatttgtcaaatggggatatgttgtaaattgcctagattcgtcttcttctgggcatccttactaatgccattgttggtagcacctcagttttgatatgtgcaaagaaagtgcagtcttaagctggttttcctactgtccacattttgtgtgtgtgttggatagagggtatctgtatgtggaggtgctgaggagagactgggaaatgaacctagagtcttacacatagcattttcccgtatcttaagccccactaacccccccccctccacatttcaatttttagacggggtcttactaatctgtccaggttggccttgagctcagtttgtaacccacacaggacttgcgtttggaattctcctgcctccgtatctcaagcagcttgaattacaggcctgtgcccacagggacagctgagggtatcagtttttaaattttgtgcttttttgtttgtttttctagtgctccattacagatatttttctttttttcttccatagtactttataaaaagacttacttttctttagacttgcattgctcacatcactctaaggtatacatttatcaccccatcattaatacattaccatttgactatcattaggctgtcactctgtaaaacccctgagaaagaaagagagtccttattttaaataggcctgatactttgctaaagaggttagtgcactatctaaaattctattcttggcaagaataggcttttgaaacatcaagaagaaatgaaatttagaggtcctcccaaacaatgaaaggtctggggaaaaaaaaagtagtaaaatgggggtgaaaacagtctaatctaaaacattgccaaaggacaaaactcacataagagttccagggaagttatttattttgaaataatttaatatgaaataagaagactctgagtgatcagaatgaaattaaagtcaagaaatctacataaaggaaaattatagtttaaagtccctgaaggggtctggcaaggaggctctggttaaaagtgcactgttcctttataggtcccaagtttgcttcctaacatccccatcaggatactgatacctgcttgttactccagctccaagggatgggattctatttcttctggccttcatggatatcaactctcaggtgtacccccggccacaatatatatacttaaaaaaaaactatattatgtctctgaagattctctggtccatttttggtggccataatacagaaaatatttatttaatttttttttaattaaaattttagatactggagtcttggctagatgagagaaggaagatgagccatttactaactctttccaaggaaatgtttgagaagagctggcaggaggcatgccttagtttccaatgaaaccttgttgagacaacacactggaggtcctgggtgagatatatgttaagatagtcttctgacttcagaactatttgaaaacgatgctgggaaaagctccacaaacaatacgggagaattacctaagattctaggtcattgagcagttttttccagggacagtactgtctctgggaccataagacctgggccaagagaaaagcctatggaatcttaccagttccatactgtacactaaaaggagagtgtctgccaagagatgcagtcaagccagctttttgtatggatcaaagctcagtcctgcggattggcttcattgtccagatgtcacagcaaatgacaatgagaaatggcaggtcagtttctcatgccaaacatcagacaaatttgtatttttgcttaaagctaagtattgatctggtaaatgtctcaactaggaactactacgtgcagatagcagtcaagttagaggtaaaagaagtgtgatccctagtgctgcttctgtgaaatatttcaatcaactgcctctagcttctgcttcacaaaactttgacacatgtcccttgacctttaccaactaccctttcacgtttgacacttaacatttgctacgtgattaaaattcagcgttaattaatttcaatgctatcagttaagttatatttagctaagaacactcacttttgtcttttgtgagtagcactgcagcgctattacaaagaggtagtcaggagggcaacagagatacgagaagagaagaatgattcagtgtgcggataattgtttcgagtgaaatttagcttggtatttttgttcctgtcctcagcagaactgagatttagcacctccggctggcatttagcccccacccccacagagaaggaggctgtgctgggtggatgctgagaatgagccacaccagaattaaattatagcacagttctaacactggcaagggttttctctggccagctcgtgtgtacaaacctggtaatgccaaaagaaaagcaaggcattgctagcaaggctttccatatggtgtagcattggcctgaatgatgggggttgaattcttgctagagagttactctccgaaacagtggctattcctcacacaaccttattggataccagaatacttgagcacagcagaatcagacatctaatcttaaaaggctacccatgaagtcatcttaatgatgacttatgtcatagtgtaacccaaatgctcattagaagtagataagtagatatcagtcctatctctccataggtttttttttttttttatggaagaatatgtttttattggctcttattccacacaccctcaccttttataaatacattatggtaacaatatggttcactaaatctgaatctcaaaatgctatggaaccattattactgttgttctggtatgaactcaaagtccttaagtgtgttgcaccactgaaatgcttctatcatgtacaggatagaaagagaggactaccctcaggtaaggaaacacagtttacaatttagttgctaaagatgcaatctcccattttgtattcttctagttgtttaaaataaatgttttgtcttatagtaactcaacttttacattgcagagtctggcctcaagccatcatggcctactcttaataataggtaaagcagattatatatattgattatatatagcagattttagattcttgaacaataacaagaatttaacccccatttccaggctatgtagtcaaataccaaagcactcaggtgtatcaggcatatgctcctggtgagatactgtagtagtaactgacctatggccttaggtcatatcccaagctatgcctacttttttccctaagggaacactgaaaggacgatcttggtctcagcacagaagaacctactcagcattctagcatgaggtgtttggctctttttgtgttccctcatcagaaccctattcttgagaacctgtaaagtcttttcatcatagaaaatatcactgggtaaacctccatgctcaatttcctaacctgggtctttcctagactctttatcatttgactatactcatgtgattatcttaatagtcttgtatcttacacctccagctgtgacttgcctcttggacacagactcactcttcacattgaaatgacttcctaattccactgaacagatggacagaagtgcatgtatatctcccatggcctcctctggtgcaggtccgagcttccctcctgcaattgactttgtccagatcctgccattatttaacacaaaagataaggtgacctttgacattagtgcaggacacttagatgaaagaaggaagacaataaattatatttaaagtaggttattattttaagtatgacaagattttgtttaattgtacttttacagtccatgagtctcttagccacttttggcttcaattagtatatatgacaataagagacaattttcaagggaaagtttaaagatctctgttttgtaatatctttcttcaatgttgactaaatagatggctgtctctatatcttgagattcaatatagtttacttctataaactatgtttctggttttctgttttcaggtactgcacaatggccttgttatggagatgaatcatccaactgtggggaagatttcagtcccaggtttgaatttttttcgttattttacttaacaccttcattcatcaactgcacataggcttcctaccacagggatctgaaagctccttaaagaacttatggaaaaacaactcaaatgtataattggtataaaagggaaatcctatgatcatacctacctgtaagaatgtatgctgagactacaggctatgtgtcttttcactaaagaatgttaaatgtctcagtgacaaaagtgtgcatgtttccttattccatattatgcagttatgggcacatgaaagtaaattatgtaattatcaatatacaaataataataataatagatatgttatagaccagaaatattttgtggttcctgtgaaggtagagaagaagaacaggaatgtgggagtggccatctatcagaactgtggtccaatgtacagatcttgactttccaggtcaaaaaatttagtgctaataaactgtggttttcaaatgttgacccataccagataagctcaccaaagtctattgcttaggcaaaaatgccattttcatttccagagggagccatctttgtgatagccaggagcatcctctatttttcagtttcaaaagcaacctgataagatttcctgaagctgctcagataatgaccgttgataaccagaaacatgtatccagagggaaaaataatgaatagaagcaaattgagagggtgtggatgtgaagggtgtacgaagggttctgtgtggagaatgaaggttaatgagggagtcacacaatcacagcctatacatgttaacatggcatttagaaagatcttgaagaaaatgttgataaagtcgtatgttcattcacccatacaatgagcatagggtgaatgtcaggtattgttttggagtccacacacagaccttgtacttattagtacgtcaaatactatgaactatgcttctgaaagttccgaaataaagaaaaataaagtgtgctgtcctagagactgacaagtacacagatgcttctgtagtttgggggactgaggaacacttatttggtaggctgctttataaactaaagttgaaaaaagaataaagttggctttgaagaataaaaaggcaaggtttgagacctgatataaaaagatctgggtgtgcttaaaggtcagaaaagaccatttggctggaaaacacactaagggcacaggcagtggcttgagccgccaccaaatcagacttaccctaatctctacagagagagcagagcaacacaatttagacttaaagtcccaagttaagacctcattacaagtgtgtatggaatagtctcttaaatgtgttagaaccaaaacagccattgcaatactttcaggatgagaaaaccttaaaactattttgcccagtttctaatttttttaacagtgaaagtgattttttttttattacaaagtctctatattttcaacagatcaaaggatgttgctcgttgctagatgaagagtccaaccaggcccttggttttcctgctttgcccctccacatgcttgcattctccaatctccttccttacatatgtggacttgttgtgggaggacttggacaaatgtcttcttgtcccagacaaggcacaaataacagaaacatacaaatgatccactcaagtataactttgtaaattagtcagtataatggggttactaacaagaacatggtaatggattccttatggagagatggctacttagaggtagttataccactgaggaaaaacatttgtctcctttggcaactgttaatcacataagtatttgggaaaagggcagttcatgagcccctttccctcaacaatggttataaatccttggggtggcacttgagtttctctgttctccataactgaaaaccaatgggcccagttttatgtggattggatcatgggaattaatgttcacagttgctggcagttcaagcaaatatagccaccccatgcccattggacagtttcacaagagaccccaaaacagagttctgaactactgatctaagttgactccatattttacagatgagatcatagagtcatttgcatccccataaatgagaagaaacagtcttcattttaaaacaatacagttgttagccagaccctgaaggaaaacagaacccagtggagaatgtaggagaatctcactggagagccactttcctcatctgttagatgtgaaatttgctgggttttgtataaaaagaataaagactcaatctcaagaaagagatttgttcttttaatttagggaaagggagactatccccattgctcagtttaatctgcgaatgtatcaagtagttatggtcacaataacgtgtgtaacaaagaacacaaaaccttagtctctttctgtgttcctttattgcatctgtgtgatcagatgggaaatgtagccacaggctttgctccaatgggtgcctttatttctgagtacacacaatggctggcttgatttctcacagcatgctgatctcagttctgctctgtgtatctattatgtcccatgacaagtggctaaagaattagaagaaacaccaaatctatagtgtcacttaagtattaacatcgaaccagcaaaccttactgtttgtcattgactaaggtgattttaagttgttttcatagggcaagaaacccaggcctttgagaagacttcctggtggagggatgagcttaatgctgaacaaataactggagccaaaaagtcaatttacaatgaagttttcagctctcctacactatctcctttctggttttatccctggtagattatttcttcttaatttctatacagttcatgtatacttttggaatgtctatcttaatgacaggatatctttctataaatttatcaatatgaaagttatcaaacttcaggctcattaattaatttttggttatataatagagacatattttgaattttctaaatttgtatagttttgtgtctaagtatattcatatttgtatttagagttaaattgttactattaacaaacccatctatattttctttgttattaatgaataatgatatggtctgaatttccatatgctgcatacttagggtctcatattattactggtaacatatatcctgaaaaagaatatgttggttttagagacagtttcactatgcagttgtagctgacctggaactcagtgtgttgcccaggccttacatctgcagcgttcatcctccctttctctcagaggtgctgagattacaatgtgagtcacatctggtctatgaccattcttatgcaacatctttagattcttattttagatgggaaatccacatggcattccctctactaaagagctcctacctatgtaccaacagaacacacctcaaagtactgcttagccaatgcaaaatacttaaccttctccacacagattaactaaaatttgcattctcttcactattcaaagatgctaggtagagttagtggctcacagagcttctagtttgtgggaaaggcaggcaggggacaataaatgtggaaaaggaggatgagtttccatggaaaactagaggctgaagtctacagagtgaagacagttcctgtgaggggtgtggtgtaaatcaatatttagaggctgtagcatggcacacgggaggctgtgaaaatatgctagaattgagaaaatgagaagaaatggcttgaagttactctggagagtgatctagatgtcagatgaatgaggtcttagacagaactcatgatgaagttaaaaccaaatcagaggtttcagagtcaatctagagcagtgtctctcgatctcttctgcataatatctgaaagctggccttggaactggagcatagacagaaacgccagccccaccagagcagatgatatcgtggattaattttaggaatggtttctgtttctaccaaaacctatggtgtcctgaggtttatggtttttgttttgttttgtttgttcttaaatttaaattaattatttcatttatttgtactccaaatgttgtccccctccaggtcccctctctcagagtttttcaccctattccctctcccctcaccctttgtctctgagagggtgctacccactgtccccctcccccctttcctggtgcatcaaatcggtacaggtttaggggcatcctctcccactgaagttaggcaaggcagtcttctgctacatatgtgctagtgaccttagaccagccgagtatgctctttggttggtggcttaggctctgggagctcccagggatccagattagttgacactgttgttcttcctctggggttgccatccctttcagcccattcaatcctacccctaactcttccacagcagtccaggacctcagtctaatggttggctgtaagtatctgcatgtttcagtccagctgtcctgagtttttaactgtgaaattaataaaaatgtgtgcttattaaatatagaaaataaagacatattcaagtcccagcagaagttctacaatgagacagatgatataaacactgactgtcacaataatggaaagagcttgcataaattatcacaaagtctgtcaattctcactgaaccgctcactgcatcttacagtgccactggccattggcctactagccagagcagatcctgctgtccttccatattctgtggaggtgccaaaatggccttggtactgtgccctgaacttcaaagtctgtcactgcagtagacttggctgtttagttctaaagttgttcactgtaacctttcaaattcatacccatgaaaatacactgtgctcatttgactccagaaacttctgggaagcgttcactggtgcatgtgtcagtgccctgtggggacacagtcttctatgcctgtgaaaggattctaaagtcaattactctgcatgcttgtctctgatctgtgttttccaaaaggagctccacattattttaaaaaatagggagccttacatttctctccacagcattctaatcttcatccttaggacttaccaatttcaatcagtgggtattggataaaggacgggaagtcatcaatttgaacaagtgtagctcaagccaaactattgaaagaattttaaactttagcaaatttttaaaatttgaattacttgctagatttttcataaaagatgctctaaaacacccttctggtcttgacacagaacatctctgtgtcaatttaggagggaaaaatcacattagcactgcctgaagcaacttaattttaaaagctattatgttgaaagaaaaaaaaaacaaaacaaaacttctaaagataatgtataccaagcttattccacataaatttttaagtaaacagctttgggaactgttttggaagtttgaccaatgagatcgtctgcaggttggggcataaacagtaaacacagtggctacctagcctggtctgtgagcagacgttcctgagccgtggactcctccaccttgcctcgttactttcatctttcttccttccctttagatatgaaagtagatgtttctgaaatcaaagtatagctaaatttttagactaactgacagcaattgggaaagctgttgcagatcttacctggcaagaggaaaaggaggaaccagggtttctgtcattactcctccatgaagtgcaatatatttgtcttcacaagaaatccaatatgaatctgatgcaagaggtttcttcccaagacaaaagcctctcagaggaccctttcaaagggaaagtaaaagataatgtaattttcttgggtgaactttcaattgaacatatagattcttcggtatttcttcaactctccccatgttaggagtatgcgaaaagtaacctgatcaaatacccaagtgctgagcttaacatagaaatcaaaacaaaactgaaataataacacaggaaggctggaggccatagtgactggaaaatattcacttttgtcttagagggcccgtaaaccatgttttagtattggctcttcaattcttggcatgtaagctggatctaattttcatttactacccaaagaggtctcattctggattaaatgtatgtattttctagtgcatctttgttgtaaattaaatgaagttgagcattcaaacattggagaaataataaaatatataaattaataaataagtagtagattttaaacctatcttccagctcctacttccattttaaggactttaagtaggtaatcaagaagttacattatcttggcttctaggtgacttccccatagacgagctgtttgatttcatcactgtatttgttcttggatggatggggatggtggtaccagtttagtgctcattaaagagagagtggctctacttactgctatctcaccaagaagagacactggcacacaaagagatgaatatttgcctgaattccaaaacaaaattatttactctcccataaatctttactaggttaagatgcattcctgtaatgaagacttagccaaagaaaatgttattggagaaagcctgcttttcatttaaaagtaccatataagctaaatgggtggcaaacatctgtaaacccagctgtcaacaggctgaggtagaattgtgagtataaggccagcctaggctatatagcaagttcagaatcagctagaaaaaacaaacctctgtcttctaaaatatagatgaatacagtttaaaactaaattaaaaaaataaaagatgatagttgaattatgattgagcagacaacattgtgttaatgtcaaaaagatgttggcagagctagaagtaggcattaaggggttaaattaaaaccccaggaattaactaatgagtcataggcagtatcccacttgccacatcaccccaaaccttaaggaagttttggcatggagctgggtctgtgggcctccaaacttatctactcagcttgagctattgctgtcttctccgtgtttgttacacatcggctttaatgaaatcaagtctgcacgttgtcatgacttcatctggcagtagacttagcagccagtgtgtttctgggctcaggttttgaggatgattaagacatcatggagagggggaggacaaggaggccttagaaggctcccccaggttttccttcacctggacgttacgtaagtgacagggggctgtgttactggcatagtgggaagcctactgatcttaccctttaaaaagttatcctaagataaacccttaattatttttaaaagctgtgactttcaagaacagataagcaacatcctaattttgattaaactaaaaattaagaaataatgtcagttaatacaaacattttcaaatgtgaagacacactccttcatgctgtctgcatctccagagaattaaagaagagccagcccacagagaaactctaccaggttgaatctgcatcctcttagttgctggatctttgggttaatgtcattttacctttgattgcttttaataccactagtatttctcattcttcaatataaaaggaaaatgtatttctctatatttcataaaattttattttatgagtaggtttaatgtcatcgatggtgtggagtattcagatgtgaaggtagatacatgtgagcaaacatttgctagggagttctctttatatgctgtctgagcacttatggctatgatctgttatatccctaggataattcagtacatgcacttttcatgtccattttgtagatggagaaagtgagacttgctgagtgttgctgcactgagcaaatattagttgagtaatttgacccaacacctgtcactaaacatattctttctgttcagaaaggaaagttgagcctaatatacagacttttggatttaacctccatttaaaagtaactaaatgtataataaactttattttattttagcttataggtaatataagattaattctgtttagatttcatgattgaagcttacattgagcacatctcctttggggattgtttgtgttttactaggtctttatttatttattttttttcttctccagaaaatatcctgttaggcgactttgatattctcaagagcacagaagtgtaaatgcaccaaaacatgtggcttacattctctctggttgccttcttttcacacattaacagaaatgcagtttgtaaaggagaagaacgaaaaatgtttgtgatctctatatggatttcagtcatcaaaagaccgaccatgttaacaccactacccagccttaccccatcatttgtgtcttttcaatggcctgcttctagtcctggggctgtgtggcaagtttccacttccttacatggggctggtcttgctttacactcaggccttgatttcctttgagaaacattaattaaatcgtaaacaatgctttaccagcataagaaagttaaagatgatttttcccttcaaacatgtgtttgatagtgtagtcagaacaagagtacagataaagtagttgacaattattgaaggattcaacattttcaaagtaaaccctgtaggaagcagaatggtgttcatcaaagagtgggaaggggtgagcagagttagtgtgtagtaagcactgaccttgagtgtaggaagatgagagatagcaaaaatggctacagcaaatattgcacaatgatattagtataatcaggccacaggactgtgaccttgaagtactcattaaatgttatgtcgtataacacatgcatatataaaagtagactctagccaataacttcttgtgatatttgaaaatttcattttaatcatactttcttttaagcaaatttttgtttatgacatatacatgtatggtgtaaatttaagacagggtagactgcatgtgttagacatatatatcttagactgcatatgttatacatatatgatgtgcatttaagacagggtagattgcatgtgctacacatgtataatataaaattaaggcagggtagactatatgtattatacatgtatagaatgcatttaagactgtatagacttcattactatacatgtatggtataacattaagacagggtagactgcatctgagatatatgtatgttgtaaagttgtgcagtaaatctccaacccaaataagcccaggcaatgaaaacacaactcaaataatgtgaatacaagctgtgcgcctagattgggcagatctaccgctacactactctattccccagctaggagatcccttataacttgcggtttctccaggccatgtgcttctgctccattttctttccacctcctcctcttcattcttcccctctctcctccctctcctcactcttcctaaaacttttcagctccaccttcccttctgctgcctacccaacagctctagcctttattttacaagttcaaatggagagaaggttcacacgaagtcacctgagtacatgattcactcctagtcccaggcagcccctctggggaagcactattagcatcaaaatgcaaacagcaccaggactatccacaacaaaaaattaatacagggtgtactagagattgttagagctcagaaagtcttgaaagaaaatttagctttataagatacatttgaaaacaatcaagcctacttaattcatctcagtggaatccttcttaatatcttgtggacactgtaatagtttaaaaaaggtatatatgcccaaggactcagaacatataagaagtagaaatacattattgaacatttctgaactataaataatacctactgtagcagagtcttaagaaaaatgaaattagatacattgttagttttttcagcccttaaaataagcatgcatgcttttctaagaacaatgacaaaacacataatttctttgtttaagaaatgtttatctggtatttgctaggtgccaagagctagctgacaagcagcacagcataagggtacatgtgacaatggtgaatcagatgaccagccataggaccaaagagagcctgaggctcaccaccaggtctataaggcctaactggactctaactcgcttttcaactaggtcttgtgtataatgtatgtagtggacactctgtaccatgaagctctacacaaagttattctgaataggttgtgcagataaaatgatacttcagagatgtcaccacagagagagcagaagagatcctgaagtcattggagttggaccatggtacagcttggtatttccaaactggagtaaccctcggttctttgcaagaatcagcaatatttgtctcatcaaagttaaccatgttggcaaaaatctctgggaaatctacgttaaacaaaggtctgtaggttttaatttctgtaccttttctcagaaatacagtccctttttatatgtggaatttttgttagatgggaataatttaatgagtgtcatttccttaaatccataagttaaggaaatggaggagttaagaaaaaggacagtggagacctctgagctcttctgagaagcccgagaagaagtgatttgtaggtcagaccactgggaacatacatactttgcagccacatgagacaatctgtaattgctatttatttctttaaaaatgactagggtgtactaacaaaggaaaaaaaaaagcacatcaaactggttgcttaaattttctcttactttatagctcaagggaccaaggattctgaggactgtttaaagaggggttttttttttcctttcatggggggtggacagtcatacacattagtcaatctgttgctcacctcagggatctttgtgtcctagagatcatggtgatgagggttggggtcatctcctgtcacctagagccatatttaacaagaaaaagctttagcagtgaagtagagtagtgctggagtgcagagcagaaacagctcacatggtgatgctcttgcactagaagcaagcattctcatggaatcaaagaaatcactcgaagagaaaacatgtccttttcattgagcttcaataacaccacactaagagaagtctgcaccgttgttcatgctctggctcttaaaatgaagttgattaagtggaaagcaactttttcaatgtgacaaagatgatgaggtgattacggggtaggatttaagtggtaatatgtggagaaattaagatgcatgactgagtagcggtgacagtgtggtatatgatggatgcctataaatccccagttaattccctaatgtggcaaatgagaagaaacagactttaacctccaagaagaaatcctaaagtatattaggaaaatgacatttaatagtaaggatgatttgactgtcattgtgtgggaaaaccaggtgagttatttaaataggactcaggatcatacttttcctatattcttatgtcaacaaagtatttttcctataaaaaaagatgcacattttttttagatggtttggagcaaaatttgcagatctgagagaagtacttagtatgctgcaaagtcttatgagctggtaacagggcagtcttgcttcaggccttggggcatgttttcctataaactaaactatagcataagtttggtgataatctttagaatgtatgttatatgtggggatatgaatgtaaagaaataccttgtaacacacatcaaaataaggacaagtaccataaaggatgcttaataaaactagctaattgtttgtgaccacagccatgctgttagttccttactaacatgccttatatcaaactttcagacagatgacactccgagagaggcactcacagtcttaatttataaaataataaactaagctgcaaggaaatgtgataatgtagctaaggtcagccacacagctatactctgcagctaattctggcttcataaagaatccacatccattaattgtgatgctttgctacctcctgaaggcatttcatttgtgtattcatcaaagacttggtatatatatatatatacatacatacatatatatattcctcagagtgtagtggttgccttgtgtttgatcaagggtgactactaagtgagttacagctacttcagattaatacaagacctggctttatctggcagcttgtaccaagtcacacgtgagttatttggcaagactagggcctgttaactttgagcccctaagcactcaaagttgaggtatagaggaacacagatctcaaaaaactctatccagatttgattatagtttctctttgtggcctttaatgattttgttacttgttttcttgcctcatggacttcaggtctattttcacataaacatatatgatccctcctttatgagtatttcattgttggaggcattgtgaaatgtcccaggaagatggagagtgaaccaactttaaggaaacatttcacattggtctgcatatttatatggataagacaaaaccactaggtatcccaacagcaagcttagctccaactttgcaccagttaatataacaagaggttctagaagtccctgtgtgtgtgtgtgggggggggggcaacttctacctcccaaaatgtcaccctattcacaagttgcacaagacatgcagaaaagctacctttctccaagatccatgacttcactatccccagatatttggctagatttctaatagtaggcataatttcctctcttgctgagtgaaagggtctcagatccaattggagagctattggctactatcaatgcatatgcaccactactgtatgcttgggattatcctgtcacgatggttgttgttgtgcttcatagacatcatctctgggtaggactagtggttgctttcctctttgggaagcttttaagatactgttcaatccttcttggcaccactaaaaccattccttagagaggagattttcaggtttaatctaactcaggttctcttgttcctgtgttcaaagagcatgttgtcttcagaagtagcatctgaaaagtagcctagggcactagcctataatgttttaggagtcttttggacaatccatatcaacaactcaaatggatttatcaggaacagtattggagtttttgttagatagcttatatttgttaaagggagtactggcatcccagatgagaaaaaagttatttaagctatcaatgtttatacagtattatatgaattatgtgcaattttaggtagataggtaataataagatccttatgacattttcagacatcctctgttttttttaccctcctccttaatctccctctcctccataattagagcccccaccatgattttttcattttcccttcaaataattcccagtgtcctctgttattctactcgctgctctcctgcaatcatccattttcacattccaggcttcagtagtacatacttatttctgaaaacatggagctagaatcttcagatgagagagaaactgtgacatttgttctttggtatctgggtctcctccctcaatataaccttttctagttcttattcatgattctatttttatttactgatgaataatattctatgttgttgaatatttaagttctttccatttctcagctgctgtactacagcagtagtgaacatggttgagcaagtatctgtgtagaatgatacagatgcatcataggatagatttgttcttagcttttggaatgaatgagggttccctttccccacatcctccccagcatttattgtcagttgttttgttgatctttgacattctgactagtgtaaaacgaaatctcaaagctgtttttgatttgtcttttcatactttctagggacaatgaatatattttaaaaagatatttccttgccactttccctttcttctttctttgaggattctgcactcagttctctgggatctccagcccatctatttttctgttataacaactcccctttcatctccaatctcttttgaaaaatctttttaaaattgattctctgtgtcatttgtaggttttaaaaaaaaatctttgttctttgaattatttatgtagtttggatattagtcttctatttgctgtatagctggcaaagatgttctaccattctttgggtttcctcttcactaaatttttttacttgtacagtagttatttggaggtcccactttccagttgttggctttaattccttggcaagtgaatcataataagaacatcttccctttgtgaaaaatcaagtgtccatagtgtgggtttatttcatggtctttgattcaattccattgatccacatgtctgatcctatacaatactatgcagtttttattgctattgctctgtagtacagcttgatatctatcaccctgcacaaaagtcaagtctaagtagatcaaagacctcaacataaaaccagaaacactgaatctaatagaaaagaaagtggggaatagccttgaactatcctgagacaacatcctgagcagaacacaagtgcttcacgctgtaatatcaactattgataaatgggacctcatgaaactgaaaggcttttgtaaggcaaaggaaattgtcattaggataaaacagcaatccacagattgggaaaggatcttcatagcaactctacctctgaaaaagggctaatatccaaaatctataaagagcacaagatgttagataccaacaacccaaataacccaattaaaacctggggtacttaactaaacagaattctcaacagaggaatcttgaatagctgagaaacacttaaaaatattcaatgtccttagtcctcagagaaatgcaaataaaaacaactctgagattccatcttacatccatcagaatggctaagttcaagaactcaagtgatatagcacatgctggaaaggatgtggagcaaggagaaaactcctccatttctggcaggagtataaatttgtacaaccactatggaaatcaatttggtggtttctcagaaaactggggataattatacttcaagaaccagctataccactcctgggcatgtgctccactataccacagggacatttgctcaaccatgttcacagaagctttgcaatgactagaaactggaaacaacctagacatcccttaactgaagaatcgataaagaaaatgtggtatatctacacgatataatactattaagctattaaaaacaaagacatcatgaattttgcaggccaatggatagaacttgagaatatcatcctgagtcaagtaacccagatccaaaaggacatgtataatatgtactcacttataagtggatattagtcataaaatgcagggtctctacactacattatatagactcagagaccctaaaccagaaggaagacccaagcaagggtgtttgaatctcacttacattggggaataaaatcgttttaggaggcaaatggagggagagaactgataggagggagtgaagaggggaaaggcagggattttaggatcacgtgtggggagaaacaggagagatggccagatggccatgagaatgaatgaaatctgcaggtgtcaggggtatgtggggggtatcttcagcgctgtgctataggggaggctctcaaaaatcaatgggggtgaccttagctgagactcacagcagtggggatacagaacctgaaggggtcatcccctatagtcaggctggaacttcagtggattgataggaacaccaatccacccacaaattttttgactcaaaatttatcctactgataagaaatgcaaggatgtgaaatggagcagagagtgaggccagtcaataattggaccaaccagagacccaacctataggcaagcaccagtccctgacactattaatgattctcttgttatgcttgcagacaggagtctagcataaatgacctctgagaggttccatccacagatacagagacccacagccaaacattagatggagcttgggcacttttatggaagagttggggaaggactaaaagccctgtaggggatagaaactctacaggaagaccaacagagtcaactaaccaggaaccttgggagctctcagagactgaaccaccaaccaaaaagcatacacagactggacctagtctcgcacacacacatagcaaatatgcaccttggtcttcatgtgaatctggaacaactggagcaggggctatccctaaagctgttgcctgtctgtggaatctattcccctaacttggctgtcttgtatagtctcagggggagaagaagccctgctgagacttgatgtgccaaggtgggggaataaacaaggatgtgtgtgtgtgggggggggggcgctactctatcagaggaaaagtatagagtattggggagtgggactgtggaaggtaatccagaaaggaggacagtaatcaggatgtaaaataaataaataaataaataaataaataaataaataaataaataaataaataaatgtatgtatgtatgttaggtcttcaatccatttgaggttaatttgtatttcccctctcaggtcctccccatcttctctcccatcagggttcacgtccttttgtctcttattagaaaagaacaggtttctaagaaagaacatcaaaacaaagaactaaaatataagataaaacaaaaatcatcacatagaagttgggcaaggtaaaccaattgaaggaaaagcccaagagaaggcacaagagtcagagtcccacactttcccatactcaagagtcctattaagacctaacctgacaggcataatacatatgcagagggcctggtgcagaccaatgggagcctgtgcttgctgcttcagtctctgtgtttcacatgagttttgctcagttgatctagaggggccttttctggtgtcctccaccccctctggttcttaagctcttagttttgtgtatggtgatagatacggatataatttcattcttctacatatgcatatccggttttccctgcaatttttggttgaagatgtgctttatcaagtgtatgttttgccatctttgttgaatattagatgactataattagttatgtatacacacttgtagtttcaattttgtttcctccgtctgtgtatttggtttccttggtctgtttgttttgttaccttggtctatagctgaggtctggaatggtaatccatcctctatgttctttttgctcaggattttcatggctattttgggacttttctgattccatatgaattttaagatactttttctacttatacataatgagatcatgaatttgattgcattggatctttagatgtcttttggtaggatggtcattttcacaatattaattctaaaactcaatgaacatgggagttctttccattttctggcatctctccttcagagctctaaattttttttttttttttttaaattttatttgttagccgggcggtggtggtgcacgcctttaatcccagcacttgggaggcagaggcaggtagatttctgagttcgaggccagcctggtctacagagtgagttccaggacagccagggctacacagagaaaccctgtctcaaaaaaaaattattttttaatcattttatttgtttatatttcaaatgctatcccacccttgcccctcccctttgcctctaatagggtcctcccccaagagatctttcatctccctggccagggttgttcctggatgtgttattttctttgaagctgctgtgaataggaatatatccaagatctctttctgtgtatgtctgttgttgatgcctataaaaactactgatgtttgcaagttgtttttgtatcctgacatactgctgaatatgttaatagtttcttttttataatatatttttactagatattttcttcttttacatttcaaatgccatcccctttcctagtttcctctccaaaaccccctgtctccttcccccttctccctgctctccaacccacccactcccacttcctggccctggcattcccctatactggggcatagaatcttctcaagaccaagggcctctcatcccattgatggccgatcaggccatcctctgctacatatgcagctagagacatgagtcccaccatgtgttttctttgattggtggtttagtcccaaggagctctggtagtactggttagtttatattgttgttcttcctatagggctgcagaccccttcagctccttgggtacttcctctagctccttcattggggaccctgtgttccgtccaatagatgactatgagcattcacttatgtatttgacaggcaccggcataacctcacaggagacagctatatcagggtcctgtcagcaaaatcttgttggcatctgcaatagcatctgggtttggtggttgtttatgggatggattcccaggtgaggcagtttctagatggtccttccttcagtctcatctccgaactttgtatctccttccataggtattttgttccctcttctaaaaagtatcaaagtatccactttgatcttctaattgagtttcatgttaatagtttcagcaaggtctctggtggaaattttaggatccttttaatataaaattatgtcatctaccaatagggatacattgacttctcctgtttgctgccctttaattttctttctttccttcttgttccaactagttcttcaatattaaaaaccaatccaaatagtggataaccctgtctctttcatgacttcaatggaattgcttcatgtacttccccacttaggatgatgttggtggtaggtttctccatatgacttacgttccctctagtcctcctttctctaagacttttatcatgaaagctttttctgcatgtgtattttgtcattaagtctgtttatgtgaacttatacttatttacttgtgtacattgaatcacttctttaccttctgggacaaagaccacttagtcataatagataataagataatcttattgatatatgtctgtatttagtttgtacatattttatttaagatttttcagtgtatgctcattgcggatattgtcctagagtttttgttgtttttgttgatgtcattgttgtgtctttaactggttttcatagtagtgtaatactggctgcatagaaggagcttggaggtacaccttctgtttatcttctgttgaatagttttaaaaggattgttgtggatccttgttgaaaacctagtaaaattaatcagaaaatctgtctgggactggaattttttagctgaagggctgtttattattgtctcaatgtcctcatttgttatggggcttttaagtcactgacctttctttgctttaattttggtggcttgattgagtctagagatttgtgcattactttaggttgttcaacttaatgaagtataggttttaaaagaactacctcaaaatattcgggacttttctggtgtctattataccatttctctgttcatttctgaatcaaaggcttagattctctccctcttttgcttatgatcactcgggccgaggtctattgatcttgtttaccttcttttttattttattagatatcttctttatttacatttcaaatgctatcccgatagttccctataccctccccctgccctgctcccctacccactcactcctgcttcttggccctggcattcccctgtactgaggcatataaagtttgcaagaccaaggggcctctcttcccaatgatggccaactaggccatcttctgctacatatgcagctagagacacgagctccggggggtactggttagttcatattgttgttccacctatagggttgcagaccccttcagctccttggatactttctctagctcctccactgggggtcctgtgttccatcctatagatgactgtgagcatccacttctgtatttgccaggcactggcatagcctcacacaagacagctatattagggtcccttcagcaaaattttgctggcatatgcaatagtgtctggatttggtggctgattatgggatggatccccttcttaaagagtcagctcatagatatattgattcttggtattgttttttttaattctatttcattttcagctctaatttttattatttcttgctatccattgggtttgacttgcttttctacgttttttatttgtatcactaagttatttatgttctcactgattttctctttttcctttttttttattaatcattttgttcattagcattccaaatgacatcctcctttctggttacccctccacaaaaccccattccatcctcctctcctccctctcctttgcccctatgagggtgctcctccactcacttacccgctcctccctcaccactctagcatctctctatgctgggacatcaagcctccacaggatcaagggcttcccctcccattgatgtcagaaaaggtcatcctctgctacatatgtatctggagccatggttaattataccttagttttctttgtaaaatctcttggctatggtctttccccttctcatcctgaaatattgctccctatatttgcctgtagtcatttaggacttgggcattgattcaggtatttcatgactttcagaatttctattgagaaatcagctattattctgatgagttttcttttatatgttgacttgtggttcttcttttgcagctttctcatattatttctctgttctgtatatttactgattaactatgatatgtagcagtgggtttcttttctagtcttgtctccttggtgttctgtgtgctacttgtatctgtttgggtatctattttcttagtttgggaagttgttttcttctatgatcttgttgacttggtttatgccatttccatggccttcttctccttcatctattcctgcagtttaaaggtttggtctttccatgatgttctgtgtattttgtatgttctttccttgagtttttctatattctttgctcatttcatcttgatcctctatgttagctttgaattctaatggattcagtctactttgagtggactcattcattcatttattcatttctatttagtagtaaattctatccctggaactttctatttgggttattgaagttttttaaccctatcttcaattcatcttgagttcttttctatgtttcaaatctattgaattctgttttaaaataccacattgtcacaatcatatatatcagccttatatgtgtgttttcttctcctttagttcattctccttaagtttattgacctttccattcgtgtcttctttaaactacttgaattctttggtaaagtacatgaactttaaaaaaaaaaaatcatcctctatcctatggttcatctaggtaattctcattgataaacatttctataagactggtgaattttagtcaggagggataatgccttgatctttcatgtgttttcatttttgcaatgagatctgggtatgtgtattattttgttaatcctgttgtgtcatgtggacagagatagttagtgccagatcaaagaattttagagcttaattggacctaaatattaaatatggctcaggtttaattaagttacatagacatagggaactgggctggtgtgcaggatgtgtgctggttcaagcctgaaattttggagtagatttaggcattcagaagggttgtggaaagaatgatcaaatagatctagagcctggcaaagcatgtgcaagatctggctggatacagtggttaaatgtgatatggtttgggggggggcagtggaaagcatgctggtgttagattagaaatggggggtggaacaggcaaaggtggccagtggccagactgtgcaggcaaactaaatgtgaggcctggattagatatggagttcggaggtgtttcgtgaaggcgagtatcagattaactcaaccagatagatcatagaaaaggatattcagtgtctaggtggtggaggggttgattgtggtcttcagttttcctttatgtaatacatattcactgtgctgtgagtttgagaggctaaactgttttgtagtgcagagaaacccaaaatctcagggaactctataagttcaaacagataatttaccataatgaatttaatgtgatattagacagggaaatagagatgtaattattattcattttatttaaaatgttcagattcaaattccctcatttttcttggtgtgtataacttgtttgtttgttttgcctttgttttttgggtttttttttttttttttttttttttcgaggcagggtttctctgtatagtcctggttatcctggaactcactttgtagaccaggctggcctcgaactcaaaaatccacctgcctctgcctcctgagtgctgggattaaaggtgtgcgccaccatgccgggcgtggtgtgtataagtttagataaaaaaaaaaaaacaaaaaaaacaaaaaaacaaaaaaaacccaaaaaaaacaattacttaccatagctactaaatgagtaggtcctgaaagggagtaaactaaggaaaagatgatattcttaaaactttatgatctattaaaggagagaaattgttctaaaataattatttattacagtaagtatgaatgaatgagcacagaaatctgagaggccatcctttcatgttattttatgggaagcctctacaagtgaccctgtcatgtttatagtcatttcctacttcaaaaatcattagaggatatacactttgtaaaggaactttcaacttgcttctgaaaacaagggtgaccactcagcctgcctgtagctgtcttgatctgtctgttcaactacaactcttcatagtaaccctttagctcctaaagaatccgtcaaagtcagcgtcagcagtaactcgaataatagcatgtactttcccacttctctcccttccgcactttcctaagcaaagtcaggagggaaaagagttacatttttcctgtagcttggtttccatatctttcttgctaccaggtgacattctgcaccaactcagactgcgttctaagttcctatagtttacacatcaaagtttgtcttctctggagaacaatagctttctggtgtttcctcctcttcttcctccttctcctcctgctccttcctcctcttcctgctccttttcctcctcttctccctcctcctcctcttccttctcttcttccattaccaccactgccaccaccaccaccttctcctactcctccagttctccctttctccttcttctcatcttttgtctttcttgcatgaagatttacaagtttgagctagtaaatatttcattacctaacactgttgccgttatcctacagcatcataggtgatggatagatcattgtcatttacacaagtgttaatcatgttgaaatatttttcatctatgggatttttgcaaatctcctttataaaatatgtttgctacttaccaaccaacaaaaaattagtaaaattattatgaatattactatttgttttacacttttatgtgatgtccttatggaccggaggcctaagggtcctacatctacatgtttttggattagttatttttacactttcagtgcattttctcttttaatgcctctttctaatttatcatacatttctcttattgtccagtcagctgaaacaatattggatagtgacaagaactgtttttaaaccaaggggcaattgctttagatgattagcagctcactggtagggaaaggtcatagtattttaggccatcactttgcctgcaaagatactttttgcatgtgttccagcagtttgtaaatagccgagctctaaataagtgaagtgtttctttaattccatttgaaaatttgtgtggaaaattaaggtatgtacccctgtggagaaagttaaggtcaagtaattcattcctgaatgtgaacagtcataaggaggctcgcacagtcacacagggggctcagaactagtattaactaatcaaattgctcccagaggagtcttcacttcctaggtcaagctcttaacagtcgccattgatggctgagacctccgaatgcttgcttagtgaatggacagagaaacaggaaattaatgaaaatggatggtataaatctgttttatacagaaatgtcttaaacaactggcgtgagggcaaaaggcacttcatcagatgttagcattgcacaatactgcccaattctcaggaaacctaaatcttttggttgctatattatttctttccttagcttaagattcacaggcaattgtataagcttgtgattatatcagcattttggaagtcagtctttttttttttttttttctattttaaaaaaggttaaactaccatttctctacagggaagaggaaaataaacaattctgaaaagtagtatatctactggtactccaacatttattgccgaagactggttttggccctggcaggaaacactgtagtgagcataatgctataatttatgtagaagagggcaatcagtagaatagtgtatatttgcctgccattttacctttgtaattattgatcagttctgtaacatttacggatgtttgtttaccaataaattaatttgttactttctcagtattcagctgggggctgggatgattacagtgtagtttccctctatttgatcttcagatgctatataggaacctgtagggcaaaggaattgagtcttctaggattgtgattacattttggtgatgacatttatgtagaagttaaaaaaaaaactttgaaaggaattaggaattttataatatataggtttttctcacattctcactctttcaaactacctaaaataccacacctgtataatgtaacaatggaaacatttttgctaaaaggaaaaaaaaaccaaagagatttggtttgaatataaagaatgatgagccttggctgatgatgaatctggtgaacattgttgtgttctataagtaatgtttaatttaaatgggacagggttcaaaggatccacaacttcttttttttttaattaggtattttcttcgtttacattttcaatgctatcccaaaggtcccccatacccacccccccaatcccctacccaccccctccccctttttggccctggcgttcccctgtactggggcatataaagtttgcaagtccaatgggcctctctttgcagtgatggccgactaggccatcttttgatacatatacagctaaagacaagagctcctgggtactggttagttcatattgttgttccacctatagggttgcagttccctttagctccttgggtaatttctctggctcctccattgggggccgtgtgaccacaacttctaaataaaaacaaaatgatgactgaaaactcacccatggaattaaattcttgttcctgggaattgtatgtcaaagtaacctcaccaatacacaccccaccttggtagtgttttggattcagagccacagagagattgttctgtggtatccaggtagcctagaatttattatcccccatcacagtctctggaagaaaggaatgatctatcagcatatggctgtgagttttggctatacatatctgtgctcctggcagatatattaatgaaacacatacacactagcttatttttaaatgccgtggctacctcaaaggctgagcactcctaaaccttcccttgctacctcaggcccaatcaggaaaatggctagtggccacttacccgaaatttcaggtggctggttgactttatctcccatatagtggcccacccttcttcccctagtcctggcgattccgcattcccctttgcatcctacctgaacaactctaagtgtcctgctctatgctccaccattggccattggcgtctttattgatcgatcaaaaaccaattggagacaaggacattcagcatctggacatgcagattcccgattgaatcaaaccattagaaccaatctccagcatatggcttacagtaacatttgatacttttggacttagcatatctggtactactaggttggttttttggtttttgttttttgttttatttggtaagggacaaaaagaagtattaaataataccagtaaaagacatgcctgaacattctgcaatgaaaacctttgacagtaccaccacactatctttaagggtcagcgaagaacggtgctcaaaataagttagatgaccttgatctacccatattacagaaattacaaaaaaatagtttgtttactttgtccttgctcacaggcttatacaggaggttttggtaggaggtgaaagcacagtttgttttttgactgcaaggtgtattttccacatttccaaaagcatacctagttgacaacactatatctgtatataggttatataatatgtcatatataatttcataccatatatatatatactctataaatgtatattatattatattatatatatcatatctgtatacctatagttatttggtatgtcagtaatcaccagttaacacacccctatgttctgaggcacactttgtataaggtgcttaatttcctctaccttgctaggtaggtgtttgccctatactttacagatttaagagttgagatttaaacggataaagggaattgttggggtcacacatctactatgacagaataactgttgaaactgatgagagtctgaatttaaaatgatttaaaacacctagtgtggtttttctaggaggaaaaaattggtctggtttaactggccgtcccttataccttttagaagtcaatctcaccatattacactatctctggcctaaatataatgtgagtgaatcatttcatctctttccatggaagtagatataaatcagtacaggtatagtcttctaaattaatttaaaggagatgtaacattaagccaagtcatcatgcattcgagggaggctctccagacatattttgaatccaagtaaatgattcaacttccacactcttattttatttccatacctatttccaaagttgtctcgtgcgctatttgttctattgagacataagcatattgccttcccctgacaaataatctctgatcttcttactggaggctgtccttatcacaaatttttgcttactcctggtaaggcattttcaacttacaatgaagtgtctatctagtacctgccctgttctaccaccgtgaagttcatggggagttgggtgggggcaacaagacagaccttcaaagactttcaattttaaagtgttactttatcttcatggacatgcgatacaataaatagttatggaacacaaagagatgatacaatgttcaaatgctggtgttctataatgatcaaaccaggggaattgctatatccatcagctgctatttgacaagcccaggacctactcactcctgcttggtctttgaattagtgaatattttataatctatcttggtttctcagctgtcaagatttgaagaaatatagcaatctgcatacttgctcagcaggaacaagccagtttatttacatggaaatcaatataaaatttgtcctttaaggagctatgctttataggttacatcacataacttactagttgcttttctgtgccccaaatatagtccctccccaccacaggaaaaacatgccatcctcgattttctttttaaaatttttcagattttttttttttccggtgcaaattaccagacctggtggaacttagagggcacagattttatattagatttactttctctatattattttattttaaatttaagcacctctatttgaaaggaagatttgaggtcagttcactttgtcctcaattcaaacatgtagcactctaaaaagcacttgtatatagatttaacggcggtgactaaagaattctaactaatttccttgtcctaactgtggcggacagtgctaactaacccaagctctttcccatcagacctgtatgccacttgactttagagactctggttggcacaagactctaacaatcttctggagattgtaggcaggaaaaaaatcaatttgttatccataaaataatgaatcatgcaataaagaaaatatgttgatttttttttcctcctctgggaacaccttgaagttttaatgaaaaggtaccttgcaaggaaagggtctgacattctcccatgctctatgactgatcaatataattttatctataaaaatatttttggaaagaaatgaaggtttgaattaaaaaaaaaaacagccacaaggataatagataatgtacttccctcgtagacaagttctcatcgaacttcacatggagaggtgtggcatcagcctggcccagagatgaccctatggggacagccacttagtcccacttccttgttagcagaaactaaaaggtgcagaatggaaggccaggccagatgggagcactcatcttttccatgaacatcgggattgggttagcacattcctgttgtgttcaagaaaattggtgttaaatccctagtgagtggccacatttctggtacgttcctaggatagtgctttttatcagttcctttttgctacccttactacaagtgtgagtggtactaaccatgattctttgtacttgctgtgatccttcgtggtaatgtttaaggaaacagtttaaagttctgtaatgcacacggagccttactaggagttactctcttctcagaggcctggctattgctggtggttttaaggaagcagggactgcctaggactggaaacaaggattggactatgccagaaggtctttaatcatttccttgggggcctttgttctcttgaggctctcttggttacaagaaacagacatgcacttaaattgcctcacgtgaaggaagaattattcaaggctttttgtgtgggagaaactgaatgaccagctccaccgagaacagtgctgagctgcagcacggccttgacatatcggtctcgtaatctggtgctgtagccgtactttccccttcctttactatctggcttcgtcggtgcgtttggagtcactaccacttcataaatatagcactgtctctctcaactctgttaactaccacctacctgctgaagtggccccagttaataagttcagtggctgtttattccggttctcagttctgtagaaaggacccaagaacaactcattgtgcaaagactgaccataacatcacacatacacaagtccagagttttactctgctggagtcaggatgctgtcagtttaatcagccgttaccaggagttgccaaaatcgtagttgcctttcatagtctctttgttttctgggccttccattacctgtggaggtgtgagaacatgatcagtaagcctgggattaagaccacagagtctccttaacttacttgagggtgttaaagcaatacaatggccatttctaaagctggctccaaaaggctaagaacaaaattaatgtttagggattctacctatgacttttaagatttacaactattttcatatattttcttttgacagaaatagaatcatttcagaaacactaaatgttcctatagttattactatttgctatcatgattgaatgatctggactgttctcttgtcaccccaaattgagatgagagtaaaattatctctagaaattatcagaaagtaacccagtggattacaggtttccaggctgagaaacttcaattgcattatagagctaccttaatattgcaattgcattatagatataaattctgcatttcctattcctctgcctttcccgctgatgagatgaatttttaacagtcccttgggatcagacctgtacttgacatcaaatttgaaatattttgtgagatagtatgcgaaaagttagtgtacttctggtaagatggcacttttgaaatctcttgccatttttttttttttttggtctggctgggtggcatatgttatgtgtggggtctagaacactctatcttcctctgagatgtggacagttctttttttttttttttttttttttttccattttttattaggtatttagctcatttacatttccaatgctatacccaaaagtcccccttaccgacccacccccactcccctacccacccactccccccctttggccctggcgttcccctgtaccggggcacacaaagtctgcgtgtccaatgggcctctctttccagtgatggccgactaggccatcttttgatacatatgcagctagagtcaagagctcaggggtactggttagttcataatgttgttccacctatagggttgaagatccctttagctccttgggtactttctctagctcctccattgggagccctgtgatccatccattagctgactgtgagcatccacttctgtgtttgctaggccccggcatagtctcacaagagacagctacatctgggtcctttcagtaaaatcttgctagtgtatgcaatggtgtcagcatttggaagctgattatggggtggatccctggatatggcagtctctacatggtccatcctttcatctcagctccatactttgtttctgtaactccttccatgagtgttttgttcccacttctaaggaggggcatagtgtccacacttcagtcttcatttttcttgagtttcatgtgtttaggaaattgtatcttatatcgtgggtatcctaggttttgggctagtatccacttatcagtgagtacatattgtgtgagttcctttgtgattgtgttacctcactcaggatgatgctctccaggtccatccatttggctaggaatttcataaattcattctttttaatagctgagtagtactccattgtgtagatgtaccacattttctgtatccattcctctgttgaggggcatctgggttttttccagcttctggctattataaataaggctgctatgaacatagtggagcatgtgtccttcttaccagttggggcttcttctggatatatgcccaggagaggtattgctggatcctccgctagtactatgtccaattttctgaggaaccgccagactgatttccagagtggttgtacaagcctgcaatcccaccaacaatggaggagtgttcctctttctccacatcctcgccagcatctgctgtcacctgaatttttgatcttagccattctcactggtgtgaggtggaatctcagggttgttttgatttgcatttccctgatgattaaggatgttgaacattttttcaggtgcttctctgccattcggtattcctcaggtgagaattctttgttcagttctgagccccattttttaagggggttatttgattttctgaggtccaccttcttgagttctttatatatgttggatattagtcccctatctgatttaggataggtaaagatcctttcccagtctgttggtggtctttttgtcttatagacagtgtcttttgcnnnnnnnnnnnnnnnnnnnnnnnnnnnnnnnnnnnnnnnnnnnnnnnnnnnnnnnnnnnnnnnnnnnnnnnnnnnnnnnnnnnnnnnnnnnnnnnnnnnnnnnnnnnnnnnnnnnnnnnnnnnnnnnnnnnnnnnnnnnnnnnnnnnnnnnnnnnnnnnnnnnnnnnnnnnnnnnnnnnnnnnnnnnnnnnnnnnnnnnnnnnnnnnnnnnnnnnnnnnnnnnnnnnnnnnnnnnnnnnnnnnnnnnnnnnnnnnnnnnnnnnnnnnnnnnnnnnnnnnnnnnnnnnnnnnnnnnnnnnnnnnnnnnnnnnnnnnnnnnnnnnnnnnnnnnnnnnnnnnnnnnnnnnnnnnnnnnnnnnnnnnnnnnnnnnnnnnnnnnnnnnnnnnnnnnnnnnnnnnnnnnnnnnnnnnnnnnnnnnnnnnnnnnnnnnnnnnnnnnnnnnnnnnnnnnnnnnnnnnnnnnnnnnnnnnnnnnnnnnnnnnnnnnnnnnnnnnnnnnnnnnnnnnnnnnnnnnnnnnnnnnnnnnnnnnnnnnnnnnnnnnnnnnnnnnnnnnnnnnnnnnnnnnnnnnnnnnnnnnnnnnnnnnnnnnnnnnnnnnnnnnnnnnnnnnnnnnnnnnnnnnnnnnnnnnnnnnnnnnnnnnnnnnnnnnnnnnnnnnnnnnnnnnnnnnnnnnnnnnnnnnnnnnnnnnnnnnnnnnnnnnnnnnnnnnnnnnnnnnnnnnnnnnnnnnnnnnnnnnnnnnnnnnnnnnnnnnnnnnnnnnnnnnnnnnnnnnnnnnnnnnnnnnnnnnnnnnnnnnnnnnnnnnnnnnnnnnnnnnnnnnnnnnnnnnnnnnnnnnnnnnnnnnnnnnnnnnnnnnnnnnnnnnnnnnnnnnnnnnnnnnnnnnnnnnnnnnnnnnnnnnnnnnnnnnnnnnnnnnnnnnnnnnnnnnnnnnnnnnnnnnnnnnnnnnnnnnnnnnnnnnnnnnnnnnnnnnnnnnnnnnnnnnnnnnnnnnnnnnnnnnnnnnnnnnnnnnnnnnnnnnnnnnnnnnnnnnnnnnnnnnnnnnnnnnnnnnnnnnnnnnnnnnnnnnnnnnnnnnnnnnnnnnnnnnnnnnnnnnnnnnnnnnnnnnnnnnnnnnnnnnnnnnnnnnnnnnnnnnnnnnnnnnnnnnnnnnnnnnnnnnnnnnnnnnnnnnnnnnnnnnnnnnnnnnnnnnnnnnnnnnnnnnnnnnnnnnnnnnnnnnnnnnnnnnnnnnnnnnnnnnnnnnnnnnnnnnnnnnnnnnnnnnnnnnnnnnnnnnnnnnnnnnnnnnnnnnnnnnnnnnnnnnnnnnnnnnnnnnnnnnnnnnnnnnnnnnnnnnnnnnnnnnnnnnnnnnnnnnnnnnnnnnnnnnnnnnnnnnnnnnnnnnnnnnnnnnnnnnnnnnnnnnnnnnnnnnnnnnnnnnnnnnnnnnnnnnnnnnnnnnnnnnnnnnnnnnnnnnnnnnnnnnnnnnnnnnnnnnnnnnnnnnnnnnnnnnnnnnnnnnnnnnnnnnnnnnnnnnnnnnnnnnnnnnnnnnnnnnnnnnnnnnnnnnnnnnnnnnnnnnnnnnnnnnnnnnnnnnnnnnnnnnnnnnnnnnnnnnnnnnnnnnnnnnnnnnnnnnnnnnnnnnnnnnnnnnnnnnnnnnnnnnnnnnnnnnnnnnnnnnnnnnnnnnnnnnnnnnnnnnnnnnnnnnnnnnnnnnnnnnnnnnnnnnnnnnnnnnnnnnnnnnnnnnnnnnnnnnnnnnnnnnnnnnnnnnnnnnnnnnnnnnnnnnnnnnnnnnnnnnnnnnnnnnnnnnnnnnnnnnnnnnnnnnnnnnnnnnnnnnnnnnnnnnnnnnnnnnnnnnnnnnnnnnnnnnnnnnnnnnnnnnnnnnnnnnnnnnnnnnnnnnnnnnnnnnnnnnnnnnnnnnnnnnnnnnnnnnnnnnnnnnnnnnnnnnnnnnnnnnnnnnnnnnnnnnnnnnnnnnnnnnnnnnnnnnnnnnnnnnnnnnnnnnnnnnnnnnnnnnnnnnnnnnnnnnnnnnnnnnnnnnnncttttcatttctgattttgttaattaggattttgtccctgtgccctttagtgagtctagctaagggtttatctatcttgttgattttctcaaagaaccaactcctcgtttggttaattctttgaatagttcttcttgtttccacttggttgatttcacccctgagtttgattatttcctgccgtctactcctcttgggtgaatttgcttcctttttttctagagcttttagatgtgttgtcaagctgctggtatgtgctctctcccgttttttcttgaaggcactcatagctatgagtttccctcttagaaatgctttcattgtgtcccaaaggtttgggtacgttgtggcttcattttcattaaactctaaaaagtctttaatttctttctttgttccttccttgaccaaggtatcattgagaagagtgttgttcagtttccatgtgaatgttggctttctgttatttattttgttattgaagatcagccttagtgcatggtgatctgataggatacatgggacaatttcaatatttttaaatctgttgaggcctgatttgtgacctattatgtggtcaattttggagaaggtaccatgaggtgctgagaagaaggtatatccttttgttttaggataaaatgttctgtagatatctgtcagatccatttgtttcatcacttctgttagtttcagtgtgtccctgtttagtttctgtttccatgatctgtccattggtgaaagtggtgtgttgaagtctcccactattattgtgtgaggcgcaatgtgtgctttgagctttactaaagtttctttagtgaatgtggctgctcttgtatttggagcatagatattcagaattgagagttcctcttggaggattttacctttgatgagaatgaagtgtccctccttgtcttttttgatgactttgggttggaagtcaatcttatcagatattaggatggctactcctgcttgtttcttcataccatttgcttggaaaattgttttccagcctttcattctgaggtagtgtctatctttttctctgagatgagtttcctgtaagcagcaaaatgttgggtcttgtttgtgtagccagtttgttagtctatgtctttttattggcgagttgagaccatttatgttaagagatattaaggaaaagtaattgttgcttcctgttactttagttgttaaaggtggcattctgttcttttggctgtcttcttttaggtttgttgagggattaccttcttgttttttctagggcgttgttcccgttcttgtattggtttttttctgttattatcctttgaagggctggattcgtggagagataatgcgtgaatttggttttgtcgtggaatactttggtttctccctctatgataattgagagtttggctgggtatagtagcctgggctgcagtttgtgttctcttagtgtctgtataacatctgtccaggctcttctggctttcatagtctctggtgaaaaacccggtgtaattctgataggcttgcctttatatgttacttgacctttttcccttactgcttttagtattctatctttatttagtgcatttgatgttctgattattatgtgtcgggaggaatttcttttctggtccagtctatttggagttctgtaggcttcttgtatgttcatatgcatctcattctttagatttgggaagttttcttcaataattttgttgaagatgtttgctggacctttgagttgaaaatcttcattctcatccactcctattatccgtacgtttggtcttctcattgtgtcctggatttcctggatattttgagttaggatctttttgcattttccattttctttgattgttgtgccgatgttctctatggaatcttctgcacctgagattctctcttccatctcttgtattctgttgctgatgctcaaatctatggttccagatttctttcctagggtttctatctctagtgttgcctcgctttgagttttctttattgtgtctacttccctttttaggtctagtatggttttgttcatttccatcacctgtttgtatgttttttcctctttttctgtaaggacttctacctgtttgattgtgttttcctgtttttctttaaggacttgtaactctttagcagtgttctcctgtatttctttaagtgatttattaaagtccttcttgatgtcctctaccatcatcatgagatatgcttttaaatctaggtctaggttctcaggtgtgttggggttccctggactgggcgaagtgggtgtgctgggttctggtgatggtgagtggtcttggttcctgttagtaagattcctccgtttacctttcgccatctggtaatctctggagttagtagttatagttgactctgtttagagattgttcttctggtgattctgttaccgtctatcagcagacctgggagacagattctctcctctgagtttcagtgctcagagcactctctgctggcaagctctcttacagggaaggtgcgcagatatcttgtatttggacctcctcctggccgaagaagaaggcccaaaacaggacctttctcagacactgtgttgctttggcagttcccaggtggtacagactctcacctaagcagactaaattcctaagttccttggagtcccgggaccaagatggcgaccgctgctgctgtggcttaagccgcctccccagccgggcgggcacctgtcctccggtccggaaggtggctggctgtccccggcccacaaagggtgctgcctcagcgcctctgtgcttccgcctgttccagaagctgtcaggttctctggcgcaccctctcacctgttcagactaatttcctaagttcggcgggtcccggaccaagatggcgaccgctgctgctgtggcttaggccgcctccccagccgcgacagttctttttttaactggctaacaagcccctgggacacgagtcactgcacgagctggtgctagggttccagaaatgtgactctgagcctggctcgttacagtaatacttgtatgtaatactgtacgtacaagaggatctgaactcaggtcttcatgtttgcagagcaagtaactgtatccactccactaagccatgttaccagactcctatatgatttttactgagcacagataaagaccatatcacagtctatttatccagcctttttagttctgatgcaggcgtcttaggactatgtacacagaccaaactccccagtatagagcggatagtaccattgtgagcagagatcttaggggaaaaaaatcaggcagattgatgggggagtgacgggagcctgcactgagtggagcttgttctggctctgttgataaactggtcggtaagaaattcacctagcttctttttaggacaccgtttcctcatctgcaaaataggcatcactttctctcatagtccccaaggatccgtgaaaaatttgcttattaataatgggaagaatgcttggaatgtgtaaatatttcctaagaagagctgggatctttcctctcgctataagattggagcagcatctcttctgctcatctgtaacttagtcagcttgtgtacatactgcattgcattaaacgctgaactctgatcctcgtgtttaaacatattaaatacaaaatatgagtagtgtaaattgtatgaaacacttttgtctcccacttggagtctcagcaatgccaggtcaccagaaacattacacagatgctgacaaaactaagtggatgtctttcagacggtgattggcaaatggcgcagcggcagaagcagtagaaactcatcgcacagtattcattagtgggccaaggaagatggaaggtgggcaaggactaaagggaattgtttagtttatttgcacattaacttttgtaacactacagaacacagagaggcgtcactgataagaaactctaagtttgaaagtttgcattcccacaatagcttggcctctgtttgctgccataaaagaacatcattttccctcccatcagacacagttctaagacgggccaattctccattcgagttgtggggaagggggacgctgttctttaacttccagtatcacagtttacatgttgttcttttattataaaaatatgagtgccacatgattgggttactctatcccacagagccacagaggaactctgtgcaggctgctcactggcatcatcacatctcactattcagctgcccatctatttgttttctttatcccacatcttaatgttggggatgaacagtgatttgcaatataagcagaaagcctcatggggatgaggataggaattgggtgtgcttataggtcctgcaagctgtgggcaggatccgtgtggtcctttaagctgtagataggaactggataaacgcatcagtcctatgggatatggacaggtgctgggcaagtgtgtaggttttatggaacctgtaaagaagctgggcgggtgtgtacgtcctataggtcgtgaaactctataacttgccctggtcatatcatgctctgttctattttggctgagactggctttgtttttaatttctgaaaaatttcaccatgattctccaaagtctttaatggtttttttttcctgggagaagttgaaaaactataaaacaaactccttggattagagtagaaactactgatgaggtaagtttgaagatggccatgctttggtttcagttttcaagagctgtaagtggacacagagaaacttagcagctctacttatcagtgactcctctgttcactgggtgggggggggggggatttatggcatccacaggggctagggccacataacccagtgtgagcttacaaggcgttagctcctcgatgccaagtgaattttggaaatgattctcctttgctgacagtcccctcattactgattgtgtggactcatttatcaggcatttcttaaaataaaccgttcatttatactaataggacttggcagcaagaaaaaattggcaggacttggagttcctagtgtgccctccctttttaaaattgagttgcctttaaaaaaaattaaaacaccaacattgaggagtttgaaacattttgagataacaattttcagagaccagcatggagttcattaaagcagaaacaatgccattataaatcttgcaaatggtaaagaggaagtattttcaaagatacttaccaaaggacaccataagcctgctgtcgccgactttgtcctttcccactcttcaggcatggaactcctcttgtggatacgcgtgtttcctatttttggcaccacatgagcttttgacgaaagctagctcgcttctctgtggggcgttcactctcctccttgaaggctagatcagctagctgcttctcttcgttacacacaagatatgctgtttctctacagccaagatgattcttctcaaggctttcttagttctgctctaggcttctggtactaaatttctgtttcatactccccaggaattaagggacattagtagaattgaccaccttccccccccccaaaaaaaacccaaagacaaaacaaaaccaatagtgatggaactcacaataaaatataagttctagttgactcttgactcaggaaaagtttgtcagctctgggaataaaaaaggccaaagagactccaacaagtattcaagtgcattcttgcatgtgtgaatgcagaggcatttgatatatatatatgtttgtagcacaccatatagggatgtgcttttaggtaacagagctatgtgggtcggtcacattgtgtgttgaaacttgagaccacatagaaatgatgcatatcactgcctggggggtaagtgaaattttttacaagtacagaggtctgccgatagatgtctctaaaaggggtgctatgtgctaggtggatgggactctagtgctttcctacccttgagttagtgtctgaactgctgctcagacaacttgtgtaggtggctattgaataacaagtggctgctattctctttatatcctttttacatttgctttagagcttgttattttggaaaactcatccttatagtagacagttatttttctgagatttatattttgaggtttatgacttctgcccaaactttaagaaggaataaatatattagttaataataatgctatttattaagagtaataattacttggtggtgataagtgtgtggatttttttgccctttactttcattaatatttccctaaaatttacagtattaccttagtattttaaaagtgattttcgagagaagaaaggaagatcccttaatttttaagtgttattaaatattgtttttccatttgttttttcttcatatacacaggaagtcagtgtgtagcattctcctcattcccctttaattctgcttcactgcatagaagagagttctcaatacttcagtccatttctgttaacctgttgcagaaagcacatagtggggcctgggatagttctgctgtgcagacctgaggaccttagtttggtatcatggtgtaatgagagaactgactcctgaaaggtgacctctattacatagatacacatacacacacacacacacacacacacacacacacacacacacacacacatacacgagtaaccaaaataaattaaaatatttttatgcttatgttgagacattatcacagagacaggatgagttcccaggagagggcataagattagagatgaggatgatagaggtaggctcagggacagcagatttgttcacaccctttttctgaccatagattcttgttctagtgatgaactttgaacattcctaagaatgtcttcttaaagaaaatagccttcataataaattactaagaaaatatactaactcggtgtatggatgagaacagtaatttaggctagaatgttactcttattttattaacatgaggtaattatttttgttattgatatttgggttttgtcttactgaggaatgaactcaggacttcacacacaccaggccagcagtctacatctgacctatacctccagcttctgcttacctctgaaatcagagattttttagttacttggcatactgtgatgtaccttcctgggaagtcggatgatctagtaatgatgtagtcggatgcccttactatgacccacagcctcaggaaacacacataaaacaattttgttctccaaatcaactggattctgacctatcaaaagacagaaatggaagattcatcatattttatctctcaggattgagcctggacatatgattcattaaaatgcttatttcctaattatacactgagttaggatgtgaggaaagtttttgaagcgtttgtctatttctatccttgcctttgtactttcctcaaaggcttacctagtatggcatgctggttggctggttggttggttggttagttggttggttggttggttggtatacacagcacagttaaagcctgactgcagagcaaacacaagcaggtattttggagcaaatgtgggggaagggcggttacagaacattgtcagaacttatttctgttcctctcatcagcatgcctttgtactggggaaggcttaccttcttcagctggagttccccttggatggggctaattgcattcttctcattttcctttttagtgtttcaagtggaccattcagaactgcttaggtcaccctcttttggtagttattctgaacactgttacatcattaacatcctacatgacttgggattacattcagagaactaagtcacttacccctggaagggactcttgtatactaatcccccattaatactctgaattcttcatctcttgagctagcatgtgtccttttcttgacccttgtatagcttgtcttttctgtaagaggaactggagaagagaatccttttaaaacaattctaatacttaaatgacgtgcaatgtccttaataatagcttgtactgtatcatcagacatgattactgtatacataggtagtaatagactcaggtggctagaaaaaccaacactgaatgaagtcccagaacctaaaaactcacccagagcttgtgatttttgttacctgaaaccagtcatttaatcacatggaaactttgtttcatcactgccctaggaattatggttcgtgtattgtaaaaaaatagacagtactaacatccatacccatggtaactaacagtgataatcctttatgcaatttctgggtaacaaaatatttttgtaaaaaccaattataaggagacattctgaatatggtcagcaggcatatagatttagtaaatcaaatgtataataatctctgctctcactggctctgccctagctagattctatccatttattcctgaggaaaggcatacactgctacatagaggtctcttgaaaacacaaatggttgtgtgtcgatggactgggtaggagtatctccatttttcattaatttattttaggtgaaccagccatgaattcattatcataatcaaacaactctgacagttgggctgtcttcctttatctcacagcccagttgttacattattttcagtataagtaaattgcctaaatcccactggaagaatcttagttctagctagcgaataggaacttcttgttgcaatttctttagactaaatggtaatgataatttaggatcaatccagaaaagtcctccaaggcttgcttttgatggctgggaacactcacactagaaacacttttccttttatttgtaggatatattatcactattcccaaaataatgtaataacacaaagaaaaatggttacaggagtaaaacaaacaaagaacaacaaaaatacctggatgtaacaacttctaagtcagtgggcttcatgagtgaaaaattataattggtttacaatttagcaaaaccaccagggacctgattgtaattttgtttttaaaaaatctgagtttgcttaagaccttgagtttcctcatagaaagtcaataagttaagtattgattaagggctgaggaaactggagagcagtatctcagacaggcatgataacagcaatatgcagaggctgcactccacgggaatgactctgcaagtgccagaagagagaccactgtagtgaaggtatggatggttgattcctgtgcaatatgcattatagcgtgttctttctggcacgtgttcaatatcacgtttaattaacaaagagaagtgattctctaatctgttaggttgggcttattatatgttattcagcaaatattagcttgacaatcatttttgactttaattacagtactgataggcaaagatattcatggactagaaacttctgccttagcagaagcaatcctgaattattttgctaattgtattgctctttaccatacaaataattgaaagagccttcagaagcagttgtgtatagaaagaattgtatttgttaatgttcttctcattattgtgatcaggtacctgacaaaaacagcctaaggaggagcttcttttggcttacggatgcaggatgtagtccatcacaatagggaaggatgcaagtaggaaagtgagggacttctcacactgtatctccagtcaggaaaagaaggatgctggtgctcaggtcagctcctcatgttaatccactctagggctacatctcatggatggtgtgagcacattcagggtggatcttctttccttagtttaatctttctagaaatggtctcatacacactgagaggtatttgcttgctggttcaagtccaactgaggtgaccataaccaaaaagaatagatccctataataaatgaaactcaaaattgagtgcatatggcttggtgtaaaaatgtagtgtagaggtaggtttaaacagttgattgtgagccttcatcaaaaatagaggctgctggtgacaacactggagtctctgaagatgcttcttgcagtggaggttagcccttttatgttttggatcattatgaatgtcagtgggattctaacctgggccattaccattctttggtacctgctggaaaacatttgcagcacttttgagttgagagactctaaatagcaggaatattagaggccaggagctcatataagagtattagaagtaaacagaaaacaaagatggagagaatccgatcagcaaagatcttcagatccaagagtcagcctgccagtgtctctaatgtttctttttgtcttatttatccaaagacaagtgttagcttgacaagcaaggtttcctgggtgtaactgaagtatcactcttcatgcctagttgagctaagagagtctcaagtttgaaagatagaagacagctgataaataccactaaagggaataccagtattttctaacaaaggtattaaaaactgtggtcctttttgcaaaagggtaaagaaaaacccaacaaaacagaaagagccagcaagtagttacaaaccctcatatccttctaggcagtgatgccggtgactttctctaggctgctactctcagccttctttgatgcttggctcaattgagaaggactctcagctgccttttccatttactcttgaggaggaagcgacctaatgaatcttgttagtttcaggggctttctaaaactattttgagttgttttctttctgttttaagaaactttcctgcaagatgaagtgtttcaatcttacaagcagctactacatagtgtatacacatgaccacattttaataactggaggaaactccttagttctttctggaagtcatgaaaatcacgtccctacattctgcttggtttgctcagttgttagaatgtaagtttgcagcacaacaggagtttgcctgaatggagtccagagataggaataaagatttagtgagaattaaggccatgctatgatcctgtccttttagttaggtttactctaattttatccagtttttcctgttttaaagtttatttgatacatattatacatatttctgacatacagcataatatttcaatgtgactatggtacataataatttggtcagattctttggcaaatctttcacctcaaacaggttttgctcaagaaaattcaaatcttattcaaagctattttgtaatacataactgaatgctcttagtcatgcacttctgtgcttatgaacattagaatttattccatctgaccagatgcacattcacctataatttattcataatcacaggataagcacagccgtttagacattctaaaaaacacaaaattgatcttattgtggtaaaaatcagttaacacgatttatttcaatttatatgtatgagtgttttgtctgcaattatgtctgtacaccacatgtgtgtaatgtcctcagaggtcagaagaaagcagtgaattccttggaactagttttaaccaatgattattggttatagccacatggtcatggtcatgagctgccctgtgggtactgggaatcgaactggggttctctgtcagagcagcctgtgccttcatccactaagtagtccagaagattctctttaacaaatctgtgtgggtgactcactatttctaacagtgggaacatcactggaactttttgtaagataacggaaactttatgtccactagttagcaagtagttcctccccctcagcagttactaaccatcattctcctgtgggataccccaggggagtgcatgcaggacagccatctgtgattggtttattttgcctagcataatttcttcaagattcatccatatggcatggatttccaaatccattcaaataatatcacagaattttctacagtaattttctacacatttctatatccaccagtcgatcaatgggccttagttttcatatcttacctattgtgtatagtactataataaacaccatctggctaaaatttctttaaggtctagagctcaattccttcatatactcaaaggtatgtttacttcactataaggtagatttttgagttacatctttaaattatgccatgtaattcagaaaatgactagtttattttacaattctattgattaaatcatgaaagggcctgtcttttatacacctgaaacactgtgaccagactgttagatatctgaattagttactcattctcagtgtgaccaaataacctgacagaaagtaaactaaggaaggaagatcttttattttgactcatgaaagtgtagtctctcattttgaggaagctaggtgctttggcggggaaagttgttcacatgttagtaggttaggaagcagacaaactgggagacaagtatcaaagccatgagcccttgagagctttcatacagacaaagcataacaacacccaagatttgtacatcactgaatcgcatttatactaattacctcatccacagcatataagatgtatggtatataaaatgtgatgacggtgatttccacttttgataaatatgtaaataagaaatgccaggaagtgtgtgtgtaggttctcttgattagtaaatgccacaggagtgtctcctcctaagagctgtcttcacaatgtgtgtctctgtgtgtgtgtgtaacataatgtttcacaaatcataattctcgtgacaatacatttccagagctgaaacacatttttaactgtacactaactttaaaatcctatttcttagaagcgagtaagtatgtaaagaggacagttttcctaaaataccctttatatgatgacttaacacagatttaaagggcagaattaacatatgatagaataatggtagagtaggtgacagaaattattttcagctaaagaaaattaattttaagggcatagtaatctaatgcatgaatcctattaccgcaccttcacctatgactgtaagctattctaaattctgatcatcaaaatatgccctggaagaagctggagttgttactatagttgttttagaaactcagcttggcttattcgtataagtatagtattaacgtaaatactgagtgaccatatgtggtagagtcctgctagctttctttagacaacaactgctgtaagcaattagttaaaatagtgtttgatgtggtcctttaatttgtcagtctgagaatattacaaatgatggagaggacttccttgaagatttgaggtggtagaactttttctaatttgcttgcagctgaaagcatattatgcctaatgctgccaggataaagaggcccccacagatgttaaagaaaacacaaaacctatttttataagtttattaaaaatttctctcttttataaaatttagaatttctacttaccaaatatttatagtatttaacataaggagaatctgctatttacactaaatgtatctttttccttttcaaacaaaaacacaaaggttgttatgataaaagaaagaccactggatttgtcttcatcaagtatctatcactgaaaacatgactctctgaagtaaacaaatatgtttacttaaagagagaagcaaagtaattcaaaattgaagaatgtttccacttgctggtctggcttatccagtgtcccactactttccagaaactgaacagtggggtcttagcctgttcatggctgtggatgtagcttaatgacttgagacctaagatgctaactaggctgacctgttattcttgaaagaatccataagggtacacgtttggattttgagagcagggcaaagtttgaagaataaattgtctaacactgtttccataggtccaattcaaacaaacagaatgttggaaaggttctgctgtcacagccaatgtttaatagaggcaggagggaataaaaaatgaaaatattatttctaaatttacattttgtcttgcctcagtccaaattcttattgctaacacaatccaaaaatatacttaagggctcacctgtgctgccactccactgttgtaaacattttctgaaatgaatcgttttgtttctgacagaagttttctttggaattaatcaaagatactaggaatatagtaactaattgaccttacacgtatctctcttcattcactttcttcaccccccccccatatgacctttccctgagagatcatgagcaaaagtttggatcctgtgtttctggctccctcctcccttaacatcttcattcccctagactatttcatttctattagcatataatatatgtccatgtgactttatctgattatataaaatctaagaagcacaaatcatagcaaacataaatcagtttgcaatgactgttttaattcacttaatattgttgtcaaaataatattgttgtatttgtttttcccaaaatgacatgactacatcctttatgtaagaataaaacattcccttgtatatattaatcacattttcctaattcttttgtctgttgatggacatataagttgcattcatagttcaactattgtgaaaattgctataagaatcaatgtataaatgactccctgatgtgttgacttgacttggagtcattcagataagtattcaggagaagtatactgggttatatgatagatcaacggctatgtgttgtgcagtttttttcagaaacctctatattatggagacaaagaaaactcttatatgatactggtaggatgtatagtactccattctccatcagctttcaaggcagtttgattttgaacacgtcagctttcctaggactgaaggtaataacataacaaagaactcagggaacaatcaaactggaattccatcgtgtcgcctagggaacttttaaaattgaagatgccttgtctggagtctctaccttaggagatcaaatgtagtctgggtatttgcaattttaagagcacttagaaggtctaacagatgtacatatttgatagcatctataactctaaatccacataacattcgcaaatgcttcttattctgacttaaaaataaaaaaggtttaaatagtcctagtgttttttttttttttttttttttttttttctggcattatgtgtatattggcccttgttgaaatttctgtttcatacacattatgtgcctctctgctttggggagagatgttgggggcaagaaatggaaggttggtgtgcatctttgatgtggtaacaggcagccaggctccgcagacacctccataatgatgagtgatggctagatactcagcttaccatcgttttctccattaagcctctttgttgtataggctttgttctcataattgtagaatactatgtgaagttattctcactgatgggtgagtggcacacacattttaagttcatttgcactgttaaaaagtcaactttctgttttatctcatagataatattttctgtttctccaatgttggatttaacctggttttttggacattggtatgttagtctacatgagtctgagatatcctgactttgatcgattctagaaatgttttgaaatgctgaccctctattatctccccagaacctaaactatgtgtgtacttaactatatcaccttaagctttatgccttcttttttgtttttcatattttaagtccttattttgggattcttagttcaagcttgaaaaacaccatcttttcagccacatgtgtctggcattcaacctgcctcttccagaaattaagggttataatcacttcaactacttattttattatgatataatttgcataactttgatttcctcttatttcacagtaagtttacataaagaatctaataatcatataggtaatgtatttcaagatttgattctttttgatttctggctttctatctctagtttatagtaacatatttctagatattcatgtgtgcttgtatgtgggtgtctatatgtgtgtgtatatgtgtgattatacatgtatttgactctgtgtgcttctgtatatttttgtttatttgtgtgtatatttctgtatacatgtatttctgtgttcttgtctgtgtgtgtttatgtgactgaatatctcagtctcccctctgtgtctctctttctgtctggtctctctgtgtacgtgtgtgtatgtatatatgtgtgtatgtgagtgtgtgtgtgtatgtgtgtgtgtgtgtgtgtgtgtgtgtgtgtgtgtgtgtgtgtgtgtgtgtgcgtgtgtgtgtgttaggtccattgaaacactatgtctttggggcctaaattttcatacattagtttgtatttgcatctgacagtttgacactgaggacactatgagactgataactccttaaactagtcccttctagagtattgtggttaccaaagtgatatttactcatgattcaaacttatgtgaagactggcctgtggttctaaagagatttatttcttcatttatcacatagacttagattgagactcagtttttcatgtgattgcttgggaaatggattctgtttctttcttttcaaattttatggtgcctacccagttttatgaaagtagctcagacatggcttctcacctagcaccattcttaggatgcatttgctattctctatgtgggcacttattcttccactgtaaatcaacagcattgaccaaatgttcttgggaaggctgctggctgtagaactcacttaattaacagcttatgattttccctgtctattgattccatctgtctaagtcactgttcttccagggtgtttcttcaagtattctagttaattcatccatacattttaaatatttttgagtgtaccctaagaattttaaatgtcttgtcttgtataaataaagaaggttcggcaagctaacccatcatatttctataaacgatttccattttcactttataattaaaaaagatttttcttttttattcttatttcatgttacagacatttggatcaatcaaacaagacaagtataggcaaaaatcttaaagtaaatatcttctagtaccttcactttttattcctaatttggaaacttatatctagagacgtttttccaaatcaatgttccctaagtcacacatttgcagttacataataacataaactgagaactactggcttgaacacaacatcagatttcttcatgaaagagacagatatgccagagagcttgagcatcttagagcatcgttgaccacttgtcagaaggctggtattcctgagacgcacatcaaggagaacgaacatagagattaggctttctcaaagctacggtgggaatcagtaagagagccagggctgaaatccagtcccctttatgatcacaatggtaccttctgtgaccagctgcttgtgaatacattttcagtaaaaccccatccaccagaccaaaatgcatgtagtatcattctctcttgagagcagcctgacattatgctacagcaatggggcttcaacttaaaacaaaacctacctatagcacccatgtctgaattttaagagtttatgcatgctcctgtaatcccagatgtgggtgacagggaacaaactttcaagaacaaactgtgacaaaaaccttttttaaaaaaccatttttggactctccccagcagaatgtgcacagttcctgactgttggtgtagtcttccttctattgcagaaaatgggctgtgggagcatggaaagatgaagtgcaatattatttacatttttgtgccaaaacattatgaagtgaactagtcaaacatgctgagccagtgcagcatatgaaaattaataggaacattttgaatatgtgatcttttacttgaaacaatataaatgaaaagggttctgttgaagggttttcttgacctcttttaaatgtttcttcttcttttcttaacactctctgttgtttataataacccctttggatcttaggtctaaaaattctttccttttagaatttcattctttctgtttgtctgtgtacaacaaatacctttcatggaaaaaagtacagtgccttgagcccattaagtcagttagtaaggatgtctaatagcttttgagatagggcaacagggtgagcactgggtttggaattctggtgttggtgtttcatttggtcatccgtcagctgaagggaaaaggcaggtataaagacatttataggggttgataaccaaaataagaacttccaactggaggctaaggaggaattcaggcatttctgggaaaatgactgatggaaggatgtattaggtttgttttctttttttcttttttcttgtttctgtgataaaatactagacaaaggtaacttaagagagaaagtgttcatttgacttacagttcagggtacagtccatcacagcctggcagtccaaatggcaggagcctgaagcagcctcctacagtgcaccacagtctggaagctgagatgtattagtggatgtctaccttacttctccttttctaaaagggccaggatcctaaactatggaatggaaccactcagcgggcaggttttcccatatcaaataacctgcttaaaacatagtcatatgccacaaaggcatgttcagtggctaacctagacaatttcttacacatgggtctagagacttgttcatttgttatagaccatgtccagttaataaaactatccatcaaccatcacagagggcaatttggtagtctttgtactaacaagtatattatgaagaattaaaaatgggagaaaaatgggagaaaaagcttagaacattgaatcaatgtcagataccaggttaagtactatacatatatgattttattctgaaatttgtaccaattgctaggaggcagctttattaatcatttctattttataagtgaagaataaaaaactactcttttccccccaaaattttcatcatagatgatagatcattaattcaaatctcaactttttttgacaccacacctctagttttaattcacaaactacactgcttcttggaaagatgtggccatagattgcatgtttttaatatttcagatgcttggggggaagtttggctttgtaccacaattctaaacctgtaaaacacaggaagtcaaaagttccaagagtgttggcgtgaaacaagtgctgagagaggacacagtagtgagtggaggagagcattagctggagacttggtctctgagggtgagccagaaacttattgctcagattgcagtgcagaaggacctgtcttgaaagggatatgaacagtgtattaagagtgaaccacagaattcctgagaaagcattttctccaacatatattcttcagagtaatgaaggaattcatagaactgctgtgttaaattttcctatgttcagtatggtagagggaattcttggttcagttgtatatgtctattgcctatgcattctgtactagtatatattaaataacataccatggaattgatttttacacccctaaaactggctgttaaaagtgagaattaagttatagtataaaatacattttacagtcacaccagaaattctaatttataatatgctttgtttgtacacatagaattcaggcatgtgtctttctgagaagatcatcatatctacattaattctctaacctgccctgttcttttttataactacaatttctatcatttatcaatgtgtatgataatttgctattaccttttaactctcctcatttagattcttgattatatattcatatttcaactctcttttgtgctgagcccttgtataaagcccaggtcaataaacacctgagtaaaagattgtgataaaaatacttaattatagcaacaaataactctgatccctttgacaaaaattctgttctaccattgtagatattttgttactttgaaaactatacacacacacacacacacacacatatatatatataattatttttagttttttaggtagattgctatacaagaagttataagaattctctgttcacaataataaagtcaaatcaggatttccttcataagatattatttagtagctgacatatcaattaatttcaaatatttgttcttttaaaattattttgtgatacgaactgtacttcaaaatgttaacttcacaaatataataattcttgattcttatttaaaagctaaactatttaaatgatattaggaatatctgttgatcaagagtattgctttaggctcagagatattaagtagattctatgtagctaaaagaattgaaaaatccttctagccactctgaggaaaagaactactaggaaggaaaagtgataggcttcaatgaaatccaataattttcagtatacctgtaatgctgtcaagagttaagctttgtttcctatgatgggagtttgggggtcgccatactattttatctaccatgaaaccatttatttctctagaactggaatctcctatttatctaaaaactccaaacaaatctaaagaaaaaaaaacccaccaccaacaaaacaaaacaaaaactaaacaaaaccaaaaaaaaaaaaaaaaaaaaaaaaaaccctaaaaacaaaactcctaggccaaggctacataaaactcttaagagctttcatttaatagatttttttttttttgcttgggaataacatttctttggaaagcttttgaagtaaacatattacaaattctttgcattctatgtgaaaactctcagaaggatattttcttaaagggaattacctaaacaaccaggaaaaagtaagatagactacaggagagaaaacagcgtttaggaactgacatgtgacgcctttcccattcataaaatacttaggctacttgagttaaggtttaagcttacagtatgtgttcatatcttagaagtgtaatctgaaaaacttgtcgaagagagaagaaaaaaatgtaaagacagcagagacagagggagggagagatagagagagagagggagaagaggggagaggggaggagacaggaggagaggggaggagagnnnnnnnnnnnnnnnnnnnnagaggggagaggggaggagaggggagagaggagagaagagaatattccattaggaaactcaggctttgaatcttgtcatcttgtcgtttattaaattgtcagtcaaggctgctggggttatggcagtagatttattatctttgcagcaaacctggcatggagaaatcttactcttggcactagtctggaaaatacagaaagcaacgtttgtgaaacaaacaaatgataggctccaacaaaatccagtgtgatcattattgtggcaaacctatcccaggcaaagccagacactggattttggaagggccagtttcccaaaaatcagcaggtttttattcagaatttttccgtagggtataaaggaaagaagttgttgtcctcatccttgtcctcctcctcctctttctcctccttctcttagccgggtgctacagctgagacccttgtgtcctgaagagggcgctgtgatccagacaaccatttgcgtcttttctaccatcttcttgccttgaatgtcctcacagtccttcctgcctcccaacctaaattagggaactttctcctttctctacatcatgatggtgttttcctagctgtggtcttgctgctcatctctgccctagagtttgggtgtggctttcctgagggtagcatggtctggagaagggctggaaaaattttccctttaaggttttgctgttgaatatgcatacagtagaaaacagggttattgtcatttctcgtcactgctcatgagggagtattactgttctattctttgtttccttcaagagaagacgtacagggtgtgtggaagttttttattatcttcagaaagtctgttttacttttgaattaataacaattataaaacactttgtttcagacattttgttaagcactttacacgtgtcctagctatatgacattatttctactttaaccactttaaagataaggacacacaggtagagacagataagcctctcagttaagattacaaggtcagaaatttacaagtgggcctgagtttatgttcttaatgacctgacaattgtcccaatcattttcagtgatgacagatagttgtttcaagacagttttctatgagactaaaactgcctgccttcttggaggggagctcatccagacacatggtgcttacaggaagctggaaagaagggatgttctaaacttcagaaaccaaatgagagatgaagcagtccgtcctgcagagaagttggttaagtacacaactcaaattaggttcaggaagtttctgaaaacgactagattcactgggtctctccttctccaagagtttataagccataaagactttcagagtcaagcttagacaatttgagctgcctagaataggctcaaactaaccaagcagcctagaagaaacataaactagctgaactttctggaagaggctgagaagaaccgagttacccagaaaggacttcagcctgttgagctgcctgtaggctgtgctgtaaccgtcaggtttccaattatcacaagctgtcacacatgctgggtaaacttcactgatgcacctgtctttatcatctgtattcctataacagtaacctcaataaaactcattggtttagccagttggacttttgtggtacttgtactttactctgtcatccattccctacctggagttagtagatatttattttagtctccctaagaatgttctcatacaacaataatgtttatagcaaacagatcaacttgatcatacagagtaaggatgtttttaaaagatttatttgtttattatatttaagtacactgtagctgtcttcagacacctcagaagagagcatcagatctcattattgatggttgtgagccaccatgtggttgttgggatttgaactcaggaccttcagaagagcagtcagtgctcttggctgctgagccatctctccagcccccactacacagtaagcattttttatgaattcagataggcagagaagactcacgataggaagaggagagggttgaatctgtgatactctaatgtatggggctaaaaggatgcttctactttaacatacacccaagaccccaggagactgttcgatctccttccctctgaggagaattcaataaacctaagtaaggtttatattctacattgatgtaagcactcgccaacatgaagacttaggacttatacccatggactggttagaaggtagacagaaactaaagcttcctcttaaacattgtctttgtctgtgatctttgtagatgtgatttggtacagaagtctgtcacttggacacattttcatgggcaaggaacactgtcttgtgggtcaaacttctagagattgaagaaaataacaattcatgcctcttagaagtatgcttgggaaggggtggttggaaaaattactcagcattcaaaagtagtgtttgcccttgcagtgggcctggggtcaaagcccagcatccacatggcaactgcccataacttctgaatcaaaggttccaacacccacctcttgcctccatgggcacaaggcattcacacaatacagacatatatacatgcacaatacccatacacattaaataaaatcaaattttaaattagataagcttggaaaatgaaaacccgcaggatatttcaaattgggctgaatgttgaactctcaactatgcaccatattcagagtatgtgggggtgttaaaatgtaatagccctgaaggtataatttatactttatgcacaggctgttatagaccatagtgtatagaatccatacagttgcatcagaggaaaacttaccactaagacctgcctataaatctagtttgaataagacagaatattgatggtattatataccccaattcttatctaaggctaagctggctacagagaaaaatggtctctacacccaaaatgaaagtaaaaatttctctaaaactagaactaaagggcagattttttttccttaaaaggaaacagtaatttgaaacagggagaaattaaactaaattagaggaaacagtaacattttgtagactgtggaatagtctcactgggaacattttggaagttccatcacttagtcacttcaaactagaccagacaaattgtttggagatatgctgcgagtagcaacgctgcagagaatggatgaatcaatgtgttctctattcccaatggaaattccccaagtgttgtcaacacacacacacacacacacacacacacacacacacggacatacatatacacagaactagtccttttcaattgatttgtcttctgactttacaacttaatcatcaccaaaatgtcattttagaaatccctaaagcctctttctatttctgggtttacgtttactatttctttggatcctggtgggctttcatgatggacaacattttctgttaagactataaaacctttacagtttccaagacatcgtctttaaagccttgtaaacacctttccccatgagtcgtcctgcttacacatcatgagcagtgagattcttaagaagccatggaaagtgagaaggaccacatagcctcaacacaatagccatttagagaaagcaatgcacctccaaaggttcttttcccatatctggaaaccatctatccctcctttgttcttgaagcaatgcttgttttcatagatagctgggggtctggtaccaaaaaactgacatcttgcttatatggagctggaagagagaattttattatcatctttgctttttcttttctacagtttatcatttttccacaagaaaataaaaccattgtattttatttacatttttagattttcttatagtaaactccactatattttaaatgctagtgattaaagcacttaacttttgattcagggtccccaatgaaggagctagaggaaggacccaaggagctgaagggattgcagccccataggaggaacaacaatataaactagccagtacccccagaactcccagggactaaatcaccaaccaaagaatacacatagtggattcatggctccagctgcatatgtagaagaggatggcctaagtcggccatcaatgggaggagaggcccttggtcctctgaaggctctatgactagactgtatttccacagtagaggaatgccagggccaggaagccagtgtgagtaagttggtgagcagggggacggggaagaggatagggtggttttggaagggaaaccaggaaagaggacaacatttgaaatataaataaagtaaatatctagttttttaaaaagggaagaaaaaagaaactggaactagcatgtttctttatgaagtatttttctggagctggagagatggctcagtggttaagagcattgactatttttccagaggtccagagttcaattcccagcaaccacatggtgactcccaaccatctgtaatgggatctgatgcccttttctggtgtgtctgaagacagctacagtgtactcatagataaaataaatagctaaacctttaaaagaaaagaaatatttttctacttgagatagttggtaatagcaggactgagtaatatcatagacttattgttaactatagtattaaaataaaaatgttctgctatatgtcattccctctcctttgttacttgaaaatcaactaatacacaactccattccttgtgctttataacaataaaaagagttgaaataaattaaaggccagcactcatcattatatagcttaaagacacaaaacggtagcagtttgttcttcagtatagagatgctggttatcctaagctttgacctccctagaaagaaaacgcagagcttctccttttccaaactgtcagaaatgaaatgctatcagcattacatgcataaatataacataaggtataaactaagcgaaataatgctaactaaaagtttcagcaaaaagtgaacttcaaagcaaagtataagtttcttgaaaagaatatgtggcatttcctagctaatggctgtttctctaccacctagattacctgaaacaacaaaccattcattaatattttatatataatatgagctttgagaaaaagaatacaagctgttatacctcgcatcaatttttgcatgaaagcttcaaaattgtgaggttaatcttccatttcttaatactgtaactgtccaggatcttctcaaattgagagagagagagagagacagaaacagagacagagacagagacagagacacagagaaatacaaagattaatgtctttaggcacacttggtgtgttgtgggtggttcaaaggctgaacaacttaaataaaaatacgttagaaaacatgatcaggtgctcaacttcaatgtttttgtaatttctatcttctgagagatgtctaggtgcccatggctaaacatcaattctcaaattgttacactaaaagagcagtggcatcaccatagtattgtcctgtttttctcccagcttgagtgcagaaacaaaaatttggcaccataggccaattctgcattcatatggaaagatttaattccactaatactgctagaaataaaaaaataataattggggcaaggagcagaatgtggggcatacagaaaccagtgttgctgcatctgaactccagaacccatttgttttccattgcttgatacactcattcaggatctgttttcacttttatttgtggtcagcttcactgtgtctacacgaaagcacccttcagaagtaaaaaggactctgtctttttacactatgacttcagacacttggctagttttaggattccctggctttggggtcggtttttttaagcctgactgaagcatgctaataaatatacagcaaagaaaaaagttattgtttttaaagactcacaagcccaaaccatagacagaagaaggcttgagccatggccttagttcttcatgcatagcacacccctagcctaattcagttccacagaaaactttatgcagtttttatttacttaagtgggactcatgggtgtgcccaaggatagaatgaggctggctgcatgtaacatactatttgggctgaggcatgaagccaaaaagcattgtttactatttatatgagtctttaccaatttctgaatgccaaaaaacatgaactcactgcttctgaatagctcattcatcaaaacagacatgaaaattttgttccttgggtttggtgagaaagtgctgtttgctgcttctctgtctggaaagcaaaatatgttggaggtctgttcatcaacccaagctgacattctcccagcagacaacagcagaaagtaagacaacttgcttccatgcagagaagcccatgtacacatttgggaactttctcgaaggcttctttcaaaactcatgttactctgagccatggggggaagaacactgaggcatcctgcagacagaaatccagcctagtgaactggtaatacatccactgtcagggatgaataattcttctgtgtagttgacttaatcgcagtcatttgtttcatgtccttgtgaaaagagcttattcctttaagatatgttttaatataaaaagtctagtgcttgcatttgacacatgtaatgctggtagccaaagaagggtagctaaggctgcctggagtagaagctcaatttttaaagaattcctaaggaagaaattacttttgatattcagagaagcacgcactctatgaaacatcttttaaaagaagtggaaatgaaaacagaccatttgcaactcctcaccacgaatttgataaaaccctgaaatagctgtccgggaccacctggaaatatgtgacaacaagcttctgtcagtactcctggatttatttcatatgaagaaaatctcattgaacacaatgattttcacttgggtgtttgatgtttgaggatttggaagtatatctagccatgcttcttgggagacttccaagatggtttttgatgatgcaaactctaatccagggagttttttcttccctatgctttacatttctaaggctccttaaatgacaatttacatgggcaaagtcaaccaatcaactatggtgttagaccgagtcagagaagaactctatttaaatacttataaaatagtttgataataaatatgtaaccatttaaacagcatgtcaattgattttaactattatagaatacattccaaaagatagataatacttgtgtatatgctggaatttgaaggttggattgaacacacggctggttgaagcagagaacaggaagtatgtctgcctgctctgagataagatggacatatgctccagagacttctaaaccattttccattcccttccatagcaccgcatgcttcaattatttagctatcaatctcatagtctacaaaatggaattaaggagtatatcatctattacctactttttaaacttgtaaggtttaaattgttccatatgtgtaaagcattcagcaccaggtccgtctcttgagataaatcaattactcagatagttgtggtggttgtcaaaacagaagcagttatagtagattattttcttgtaattgggaacctgcagaggatattggaaaagtatagactatttacatttttgaagatcaagacatagtttgatgcttgatgttgtagaataatgacatttgatatgaggcatcgaatagtggatcttcaatcaagcagggcaggtagggagaaagactagtaggaaggagggctctaaggcaaatagaagcgtattgcccatggcctacgcagaacaataaaacttggttagccaactgagatgtgaaagagaacagagagcattgacaagtgtacagggtgggatctgcacaaccagacagaggctcagaatcacacaaggttaacagtttgagttactatgtaagtgtcatctggccatgagaaatggcactaatccatggcccactcttactgtttggcaacaaggcaagcacaagagacttcacgattgattccaaacttgacagctgctacattccaaggctactcttcaggacttgtctatgagaatggcctctggcctcttgtctctggtctctgggccttccagaagatagagggcctgagacacccagcaacagaagtctgagcaggagaaataagtggaaacagccttctggagaatagagatgctttcgatctgtggtaactatgttcagccaagttgggatattctgaagagaagtagccatatgcttgggcactgttttctcccttactgcccaactggtctacatccagccatgttcccaggggacattgcttccattccccaagccttactcttctgcagcttcccaaagcccagttggtttaaatattttgtccttctattgctcaaacctaataaggatgccagtcagctgtgtgtatggataaggagctgggcatgaagaacattcttccaagggccttttgatctttaaggggctgtaagtggcccagctcccttcttttataccgaaatttctcttgtatgtgtcattccaacagattgttttccttcttatgaatgcaattgttgcccccttgaagattttataagaaacagagtggaggccattcttaagcaggccaaggaagaaaccatgcaatgataacttgctcgcctctcagtctagtcactctggttgttcttatagacaggtgcttatctcagtggcatggctaagtgactttgggtcattcatgcccatttcttactcggatctgaatgaattaaaatcttacaaaatgcatcagtttggcaatatgtcttgaaaaactggatttggaggggactgtacctgattttaatttcacttatgttgtacctacagacacgttgactgcatcaaagcctggttctgcttttcttaatagtacttttctttcaggaacaaaattatatataatagaatatattatatatataatattatatgtaatgtatataatgttaaagttatttttcattagattagtatgagcaaatcaaaaaactgtgacatttaattatgtacttgtatatgctacatttgatttcttgttctctctctctctcttaaacaaatacttgcaaactacatattatagatgattacataagtccagtaataatttagggaaacttagatagtggaatttagctcattaggttcttcataaattcttcttcttagcccacagtgctatctcaagcttgctgcatgtacatgtgaaggtcctttttacatatggaataacagaatcttagtaggtgaggtcatcactatacataattaattatagatattaactccaaattcaggaactgagttgatgaaaatgaaaagtgaaataagagttgtatgaagatgttgtaaagaagtctaaaaagggtagaagtgaaacaagagagtttatcttcacagtcttgaggggagaattgtggagtttataaactgtgacccagtgtttcatttcctgttcttaacttgaagattttggtagaatgaggtggttggaacttccttcttttttgtggctacttcagggaactgcctaaaaaaaaaaaaaactcagtcatttattatctaacccctagagcctactgagatggacttgtattctgtcagcactgtgttagttgatgaaaacacagatgtgactaaactgcttctctgaatacaacaaatctgaggtcttcatagagacaaatgaagaaatcactgtcctcaatataatgggttgatttgtagaggaatatggaactatggaacacctaacctgggtcaccatgggtggagtggagtaatgaataaaaagataagcattgagttggtgaaaataaagggaccaaaaccaggctgaaaattctctgatcatttaaaataatgcatggcaaagtgctgttccatgcaaaatagtgatgagtgatttttcacaagtagcctttggggctcttgtggtcattcaaaagataaaatcatggatcaagtgacataaactgccatcagggtaatttaaacaaaggctgatgaagttgtcatcagaccatgaacatgtattgaagaaaagtagaaagcagactttgctagtagtagccttgggctgttaatatcagctgtctgtgaggttgaaatacaagttcaagtccatcttggaaacaacttaatgtttcaaaataaaaattcagaagaggatagtgaataagctcaatgattaaagccttgcctacaactatgcattacccacgaggttcaatccccattactacaagaatcttttttaaggaaagagagagagagagggagagggagagagagagagagagagagagagagagagagagagagagagagagagagagagaaagggagagagagagagagaaagggagagagagagagagagcaggctaagagaatgaataaaaaaaaagaaaattaaaaaaccatagatcataggacacgtgccaaatcctgttttcaaaggttaaaataatcgaggtaacagaaaagaagaagtatccatataaataagctgactactgagagctatatccaaggaacaaggaatgaggccatgcaggagttagtgatcagcagaggtgagactcacagatacaagataaatactatgcatctcatcaattagaagggcatttcacaagtgtgtgtctcttttgtcacccttctttagtgaaagagagaaatacattatatatcatagccaacagtagatatgctatcaagataaagaaagagaactggtgtattcgtgcagagaacatggttactggcagagtccttaaacagattgaagggcctgatagaactctgtcactgtgaagtacatacacatactgatctgaggagatctggtcatttagaaaaatgaggaattctaagagaggtaagcaggaggatgaaaatgaaagaaaggtcattaaaggggcatcatgggactgggccaccaggaagactaacatgaccagggaacgagaaaggggaaatgctaacatgtcaggaggtgaaagcttagccagaggtctttgagacattagaaagtcttttgggttttctgacttgtgtttatttctcttgttgcaagtataatgcctaaaatcagaccttggatgtgatgtttgtatagcacagcatggagcaagacacctttagattttctagagcttcataattgtcagcaatagttgctgctattgtatcatcttcatcttcatcattgttatcatcattgccaaagtagtcgtctatgttgttattgtcatcctggcttttaccatacagtctatctgaattttttggaatactcctttaaaaatgtaataacagaaataatctttgtgaatgaatcaattagatcttaactagaactttagttaaaaatctattctaattgttcttctggcattttgctctgtcactgataaattttcccagccctctctcttaacatcttaggttaacactctctagtacatacatatgccagaagaactgaagaacttttccttcatttaaaaatagatcaaaggcaaacatatttcaagtagacttcctactacagggaagactcacactggagaatgagagcagaaactgtagcttcacattcatgctcagtgagcgaagctttctcctctccagcgttctatgttcttcttcctactgttacaaaggctaacatcaggtggaaggcatagatttaaggcctttattttcattaagaagaaactgggcttattacaaattttcctttctttcttcctcctcattctcattttcatttttgaagagcagctccaaagttgtgtattttataatctcattttctttctattttagatgtgtgtgtcaaatatatgtgaactaagagaaggattgccagatgggctgtgttagttcctcatcatgaccatggtacattttaggtatcaacacaaatttgtttcctggtttataaacttatttctaaataataaccaaaaattcactgattatctagttgtttccatatactgaacataaacaatgaatattcggtgaccccctttctaaaaaagaaaaaaccctactatcaaattatgcattgactaatgcatataatggaaacacttatgggaaacagagataagaaatacacaaaaaaccttgagcagcaggtaattttttttatctcaggtttattacaagtagatatgcttaaacttattatatagccagacagaggaaaaaaaacatttcaaagcaaaaagaaaattacctaagaaaaattgtccatagtagtaaagcaaatagatatcattagtatccaaatagaaaaatgtgtatcaattctctctctctctctctctctctctctctctctctctgtgtgtgtgtgtgtgtgtgtgtgtgtgtgtgaagaaatatgaggtctggagaaaagcatcagcataggatgagatggaagaggtaggtttcttaatctttaatcttccagcggtgtttctgaacaatgtaggaagcaggccactgacacaccatactggatgatacatgacatggattagttggaataaatctcaaatttttgcttgaccctatgtcttggttcagtttgtagtacataagaacatgctgccaattgcaatctaaaacgaacatttggctcacaatcttagggcctggtagattcaatgccaaggtgcttgtcttagtcagggtttctattcctgcataaacatcatgaccagaaagcaagttggggaggaaagggtttattcagcttacacttccatagtgctgttcatcaccaaaggaagtcaggactggaactcaagcaggccaggaagcaggagctgatgcagaggccatggagggatgttctttactggcttgcttcccctggcttgctcagcctgctctcctatagaacccaagactaccagcccagggatggtcccacccacaaggggcccttctgccttgatcactaattgagaaaatgccccacagctggatctcatggaggcacttccccaactgaaactcctttctctgtgatatctccagcctgtgtcaagttgacacacaaaaccagccagtacttatgaagtggtcactgggtaggaaaggcggcaaagggagaacaagaaaggggaggatcacttgcatcctgcagaaacttcacttatccattcttccacacactcagttatgcttcagtgtgaaatgggcacggctcacaccactgccttctcggaggctggcctagtcatcagggagatggcattatttcacatagtctttcaggaacccagaatccttcactcccaaaccgctgatatgtgctcttgaggatactttaaagggaggaacagatgttaaaagttgcatatgaggcctggagtttgggaccaagtctgcaagggagcaagtctgcaagtggtgcataaaacttctgcttgccttccattgcatagaatttgtattcatgacacaaccagggaaatgtggtctgtctttgtgcctggaaggaacgtaaactgtttgaggtgggcataggttagcaagtctgactcatcatagtactctggtcatgcggcagtcaacactgaggagtccttaaacccaggagctgccttcttgtcctgttggcaaccttgctgcctgtgctcagcattcatttgaaaacttttaatttgcatacttataatctgtgattgtctgtggcttgagtgaagaaaacttttggggcttcaggctttccatggaaatataaaactgagttcagagtgaatggtaaagtctagaaatgccactccctgcctaaccctttaccatatccattctatgaaaaaaagaaagaaagaaagaaagaaagaaagaaggaaagaaagaaagaaagagagagagaaaaaaggaaaagagaaagagaaaggaaacaggaacttgactcctttaaaatcataaaacttcacataaagaaggcaaatgggagcagaggctgtgtgtgctctcggcaaacctctccttcagctatgactgccgacttcactcagcccgtatgtagtttattcaggtcagccaggtgctggtctacacacacggctttccagggctgtgattcacacaagcacttgtattcctggctagaacctccaacaaattttagacacacataataactcttcttccaattttagtgttttaaagagagatctatgtgcctgtagcactgctctaagtaggaaaactaaatcaccacagtttcacatatgtacacatataaatttattttgtagtacatagatcatgcagattacttccccacatcttctgttttattaagtgcttacagacaatgtaattacaagggggactcaaactcaaaatgtgaaatcgtgataaacacagaacactatgtttgtaagtcctccagttgcacggctcactgtctctaagttttaaatgtccttactaagccacaccttcatagtttacttatattaaaaataacagctggcttttaaattaatttgaaaatgaatataatctataccagttacatatgcaagaagtgaagtaattcctggcacccttcaactgataccctatcttccagtttagggcaaagcatttaacattcagaaaaattacacataagatagtatttttatgtcttttccctgggagcagaggaacaggcagtacatgtatgctgtacacctgtaaacctagtgttatagtaggtacctagggaataaacacaccactagaaagaaatctggacaatgagtcaggctgagaacagctggtggagaaatcagactgagaatgggagcaatctgtggaaggaatttgaattcactataaacattttgcaagccttaggtgaagaagttagaactctgagccttgaagcaagctgaggctggtttcaggctaaagagaaagtctctgaaaccacaaagcttattaaagagctgccatttaaacattgcatggagactgttacttcttttttttttttaattaggcattttttcatttacatttcaaatgctatcccaaaagtcccccagaccctcccccccacacacactcccctactcacccactcccacttcttagccctggcgttcccccgtactgaagcatataaagtttccaagaccaaggggtctctcttcccaatgatggccgactagaccatcttctgatacatatgcagctagagacactagctctggggggtactaattagttcatattgttgttccacctatggggttgcagaccccttcagctccttgggtactttctctagctcctccattgggggccctgtgatccatccaatagctgactgtgagcatccacctctgtgttttccaggccccggcatagaacgtgcctgatcttgtctgatctcggatcgggcctggttagtacttggatgggagactgtaacttctgaatcacctactatgtgtcagtcttcacgaaatttgcccttgctctctgctgtgataactccttggatgatctgtatattttctggaaatggcctcgctagggatatgagaggcatatctttgaatattaatccctttgtaggaaaagcaggaaagaaccttcacctacctatgaaaatgatccaagcctgctactgtaatggatagcaacatgaccacaaaaataagcatgattctggattgtaaaatgagatgtgaatttacatgacaatattcaaattgcctgcattttctttttgaggtatttgtgtgtgtgtgtgtgtgtgtgtgtgtgtgtgtgtgtatgtcctctgtatattgccttttttattgttttttttttttttttttgttaagttgaaccaaaaggagttgcttgtccaacaaaggcacaatgagctgaggtcacaggcagaaaggagggctgagcagggaaaaagccctggaaagagaaacacaaagtaagggtggagcagactctcagcctgggccagagaaaaacccaccagtgcgaaccgggacggatcaaatgcgagtgggcagaaggtgcaatccttgctcaaaacactctgggcgaagaaacactgctgaggccaggctcctgttggagcatccgagcctccagtaaggaagagaatgctaagtggtgcagcaagatggatgcggtgaaggggctgcttagagctaaagcacactgactctgacctttagatacccaagtatctttatctgatcatcacgttcagtcggattctgatttcggacttccatcccatttgtaatcaactgagagtcaaaagctcttaattctttggagaggttggacagcagaggtttggatcagtttctggtcttgccctgctttcctgagcttgggccttagcttcctcttgtctgtggctcagagacttgatctgcaactattctgtctgccctcttattagtctttcctgtaaaattccctctggtcaggaggaaggctggaaaagagaaacaaacatcgccaggacttgaacttgacaagagcaacaacaaaactgcccccagccatggaaaccatcccaccacagaagggttggcacttgcttgtcaggtgttctcctgatattaccagcacataagtggcctagtctgtcaggcaccagcggcttgaaaaccaatcttgtcttctagcctaagcaccatgctgacattgattaaaaggccattttgaaatgttcgcctggtttctgaggtggaatgtgcactgtgtctactctcaaccctttggagtttaagtccaaacattgcctgttctgggagaactccagaatggaaatgaaacagataactggacgaagagagaggagaagaagaacagtgagttgcaggtacagtgcatacgcttgctttgtgcctgcagaagagctcctgctcatggtccaagagtagaacgacatggcccagggccactagtttttgttgctcggtcagagagagggactgagtgctacggaatgactgggactgcaagactggagaggttgggggttctttgagtatccctaagaccaacttttaatttcttccaaaacttggttaattcaatttcccttttaatagctccccagtaaagaaggacaaaaaagaagacattatagagaaagtgcatgacagagagagagagagagagagagagagagatttaatttcaaagcactctctaatctgtctcttaaatggttatctctttctcctgttatgtttaaattctaaactgtgcttgactcttttagcaaaataaaacaaacaaataaaacacgagtatcttaaggacacaaggtggactggggaaaaacacagaagagaaatagttcagacattttcagttttaacagagtgcatggctatgttgcttctgacagtgagtttatgtgatgtgagctggaaatgtgtgctgaaggcctgcaggcatgtgcttggctgcacagtgtaccttgctgcactgaaaagagtgaggagggaggatgctcttgtctcgtgccatagtttaggaaaatggtcctaggtttccgtgtttaggataatgatggttgcaggtttgctgtctatatttgcattatgttgaggtatgttccacctagtcctggtttcctcaagactttttataagggaggtgtattcatgtctatgtaattatcaacatgattgactgggagatttctgcctttaagcctgttaatatggcatattgcatgtattgatttatacatatatgctgaaacaaatttatatccttgaggtaaaaacaatgtgatcataatgtatgttgttcttgagggaatcttgaattcagatatctttttaaagacatctatgctcttcagggagtttttgtttgtttgtttgtttgtatttctgccatccttactgccacctcttcctcctcctcctccttagccattttctacccctcatccttgtcctcatatttgtccttctcctcccttctccctctagtattaattctttgtttcttatttttgacatcttgaccatgatatgtcaaggagtgtttcctctctgatccagtctatttggagttctaatagcttcctgtcattagatgtctatttatttctctgggtttggaaaatacttggcagtaatttgagtaaaagcttgtctatgcccttagcttttatcttagttcttctctcccatggaatcttagattcggtctcttatatgtaacctgttcttcttggaaatgatctccttatgtatttctgtgaatgatattgttttgacctttcctccaccatggatattcaatagtttgatcatgttcgttgatgatacttctttctccagtatttattttattgattctctttttctggaatatgtggttatttactgcatctatatttccttgcagaattttcttccatatttctaattttaaattaaaatttaacactctttacacaagtactgtatttacccatttccacaactccttcatcttccactccatctatcttttccttcctctcaatttcattacttcttcatctttaattaatataaatatgcatgtgcatgtgtgtatgaatatatgtatgtattatgcatacacacatacatagagagagagccagagcaagagtgaggagagagagaaagagagagagagcacgcacacagacatgcagagtcattcatacatgtttagggatgaccatttaggataggaaaaattatcagggcctcatccctggatgaatcttattctccctgtctcagcagtcattgcttgcctacagctctttatctagtggtgggatgttgtgaacttctccttatctgcattgtcatgccaatgagtttatcattgtgcaggtcttgtttgggcagcttccctgtccttcaataaaatctagaatacaaaaccttgcagcaggtcttctgactccttacaatcatcccaccatctcttctgtgatgttccttgagccttagatgtaacagttgtgttgaatatgtattaactgggaccaagaaaccgacagtcacgtattctctggatttcaatcactcacagggctatataatagcccagtggttctcaacattccttattctgtggccctttagtatagttccccatgttgttgtgacactcaaccataaaattattttgttgctatttcataaatataatatgaatcataatgtaaatatcagatatacaagatatctgatatgagaccccaaagaaatgctataataacctctactgtttaaacaaagaaaaaagattctttgatggtgcgtgagagttatacttttcagtaggtggaaggttcttaaattttttttttaatttctcctcaaaagtcttgattcttttacctcctttgataattttctagtttatatcttgagttaatttagcaactttcccatgtcttgtatcaaatattttttctatttatttgattctgctagttggtctttgaaccttttcaacagtcttttaaactctgtttcaggcaacttagctatctcataatctctgtttgccagtgttgtgaggctgtctgtcaactcatgatgatgtaataatggtggtatgtctcgtgtgtgtgtgtgtgtgtgtgtgtgtgcatgtgtgatatattttctgattctgactgaatctaaccaacttctggtttgggaccttttcaccttttccaactatttttgttttttctgttttatgtgagttttactggttggttttctttgcttgtatttgtatataggaagaaagttgactacaataatagccatgatggtatgataaacacaacaaagttaatagaagtggaagagtctctctataagactatgactgaaaattagaatatgcttgtgtttccacagtgtcaaaatttattaagataataaattcactaggtaggatggtttcaaaggcaacatttttttctgacaaccctgcttttcttggcagtctgaccaaagcaaacatgaattattttatcttagtcttcttttttaataagagtaagtctcacataacacaccatatagtaagtatatctctatatatgtgtacgtgtatgttgaatggataccaggggtaaaagaggttgcaccagagttgtaggagatttcagaagtaggatgatggaaatacagatagtctgtattgacaaaataaggagccaaggttagcttcccactctctacagactgacacagtgtcatggtagagagcagccactcagagataagcctaaggaccagataaaagggcaggcgcgggtttagagaagtactgagtgggcagatgggcagcagatccaaagaggtgaaaaggaggataggcaaatgacagttaaataggccatgccagcagcggaggctgggagttgagcctgtgctccttgacagacacagcaggtataagatgacaggccagtggaagccactgtcacagtagtagtgtgtgtagagtactacaagggtatagatggagttatcctctttcctgtatctcatgtgtctggtaagtccttaggtctggcttctctggtatgactttgatatgtctacagtcttaattcaccttgattaatttctatggccccacctttttctactccatggaatacattatttatctgtctatgctgcaggggtattgctgaacagatggtgttgtttgtggatctaaccaagtgcatagtcatcctccgtcctcgaaaaggagaaagagctgcttgtaaaatacagcctcgcaaggaaaagcccctccgaaaaagcaagaatttgcacaatatggagtgacagttcagggcacagcttgatcttcttgacttgtgttccctataaactttttaaaagatttaggaatctttgtcttatgtgtctacatgttttgccagcataaggggatgtgcaccacatgtgtgcctgcaacctgtaaagtttcaaagagggcatcagaacccctgaaactggagttctgggtggttgtgagccagcctgtgggaggagagaactgaaactgggtcctttttaagagcaacaagggcttttaaccattgagacatctcttcagccacgtatacagtcttccctgagtctgtacacagaagtgctagggtttgtcagtttgggagattccatctggagttgcagagtcctactgtctactatcacatgctctgaggtttcctgagagtacagcgcacaaagtcccaattcagtattaattcttgtgagacggtacccgactgcttcagcttcagtggccaccaatacagctgttttcaatcacccaccattagatctccagtcttgttcttgggccctctcagtgccacctttaccacccatctatgcctatatgctcccactcctggctccacattctgccagtgctgctcatgttccgccagtccaagtctacagtattttccttatccctttatcctactaagactgatataagtactgtgaatagtactgtaataagcattgggttgaagctttgtctactgttcactggctgatactctctaaggtctatggagaaggaagaggaaaaaaggatacttgtatttgaaatgacctcaacagaatgtcagaatgttttctctctttaaaaaaaaaattggatatttgatttatttacattgcaaatgttaccctctttcccagtttcccccctggaaacaccctatcccacccaccctcgccctgcttctatgatggtgctcacccacccacccactcactcctacctccctgcccaggcattctcctacagtggggcatcaagccttcccaggaccaagggcctctactcccattgatgtcccacaaggccatcctctgctacatttggaggtggagccatggcccccttcatgtgtactctttggctggttctttagtctctgggagctttgggggtactggttggttgatatagttgttcttcctatgggttaccaacctcttcacctcttttagttctttaactcttccactggggaccctgtgttcagtccaatggttggctgcaagcattcaatctgtatttgtcaggctctggcagagcctcacaggagacaggtatatcaggctcctgtcagcaagcatttcttggcatccacaatagtatctgggtttgatgtctgtatatgggatggatccccaggtgaggcagtctctgaatggtctttccttcagtttctgctccacactttgtctccatatttcctcctgttagtatttggtccccccttctaagaaggaccgaagcatccacactttggtcttccttcttgagcttcatgtggtctgtgagttgtatattgggtattcctagcttttaggctaatatccacttatcaatgagtgcataccatgtgtgttcttttgtgactaggttacctcacttaacatgatattttctagttccaaccatttgcctaagaatttcatgaattcattgtttttaatagctaagtagtactccattgtataaatgccagaatgctttcaagttcagaatttggattagagtattagttatcttattttgagtgttttcaatatctgaagcattcataaaatgtttgttagaaaagttgaaatcaataagaaaagaagatatagaactataataataagaatttttaccaactgcttcttctaaaccaaaactaaagtttccaattctgaaagcctccagcctgcagatatttaaatgctatgggactataaaaagttctccttagctcttgactcctgggtgaccaaatatggttcttaacttcagaccattgctgtgtccaggccttcacccttccttgaccagttctggtctctatgtagacacatagaacatgcattgagcttaactgttcgaaatagagctctgacttccccaacaatggtttgtgcaacatcacccatcccataaaacttacaagtgcaccattttagtttccataagcaagcactcttccatagcccctcgattaaaaacaagtactcccaacagctacctagctattctccctcaggccaccacactatttcttttggaaagagttactttaaaatgcacaaatgcaaactcaaaagcttccaaaggcttctctgtactaagaacccagaaagtcccatcagcagtctgtggaatgctcatcagcaggtcttacttcactcctgctgtactgtctgtttagtagtcacaatgtctttctggggatcaacttaactgtatcttagtcacgtacaaaatgactgacatacatattgctgctcttgcctctgctcagagtctttcaaattacacaatttccttccttttcttagcttagtttctctgaccaccccatcaacctgttgtttccatttgccttgcctagactcatctctctaggtcaatgattggatgttttatatgttggagacaaagaataccctctgtgtcacacaatgtaaggcacaaacagaaagggtgcacaaatgctggttcaaacagagctctcaaagctcactggggcaggaagggccacttgatttttattctaacacagtgaagcatgacttccctatccactggggtctgacatcacactctttcttggttgcctaattttaaaagaattgatgcaaaggaaacaaaggaaagatgaaaggagttggtcacaaggtcccagaatgcagcatgacctttgtataaactaaagttttaccaggtgtggtgaaagtggggtttaatacatttgcaaggtgagggggataaagagatttatctttgaattctttttgctaaataaaagttagcacttgacagaaaaatctaatatttaatgtcttatgtatatttgttcaaatagcaaataaatactagttattgatcagctgctcacaaagacattcacaaatatattaattcatttctctggaggaacccagagaatgtagcattcttttgtactttcctttaccagagattctgctggtcacatttgcatagtaatttaattttcacaaattcttagagatgtcaacattgtctgaattttagaattgagaagatgtgacctttctgaaggttaaatatacctttaactcataacttctaataagctctacagtatgcccaggcctacctcacaccagtctatactttcttgtccacattcacctctcctctctaaaagttgcatattcacttttgacaaatggcctataacccttcaaatacagtgacatacacagttttcagtgtctggtgaataattctgccttctcctctctcctattccatctttataacctaggcacattcccttttcttcattgcttatggctgctgtagtctcagaggaatgatagccttcctgggccacccagaagttggatataggagagcaggttaggtcagagagagcaagcctggaaacaatttgtgctggaagacttacagataggtttgtttcttagaattttttggaaggttgtcatgtgaaaccttaaatatacttccccatagaaacaatattattagtgatagatagggtctggggggcaaggagaaaccttgtacaatgcaaatgtccaaataagatattactagataatttttgaattcctagaattcacatggattctggaggaaagctgtttctgttccaaatgtggaaatcaagaacatattctttacctccagtttttatttctctgtatatgaaagtatccctactgtacactcttaattcagctcactggcaacacagctcattgtatatttccaggtcatggggccagtgaaggaatgaatcttgcatgactctcctgttatcaagaagggatagtgagagactctggaacctgttgtgtatgggtactctggtaggactgtggtcaaggtacatatagaagtcactctggtttcaggggaacaacaactgttgaacttggcactttgtagtgagaagtcagaaaagttaaacagtatgagcaatacgaagatatttatcatatctccttaaaagaatccccacgtgcagagatgtggatgtctctaagtatatcctgctatctatggcaaaacagacttaagagaagttttaagaaatgttattaggtaaatattaatattactattattccttacatggaaagtaaatgctgacttacttctataactcttccttggagaaggcagctggctttttgctttgccattttaacttgtactgggacatgaactacccaatttcccagatcccctgttttatgctgctagactacattgtgttgtatttttaaaactgaaatcatcttcacaaaacatttgcaagttgggagaaacattaagaataattatgaatatttctctagaacatttcttttccaggatgttgctcatgctcctcattaataaaaagtcacctgatatgaggtcaggtgcttcttgtttctggcctgaaagagtccatatgagacaagggtctgaagcatcccagctggacagtactggaggcagcatctggagttctgaattctcttctcccacaaatattgcaaagagtttttcattgggtgaaggacagtggcaaacaccactaataactccgttaagcaagactccaccctttcctattattggcaattgaaccactgtttctcagtgttgttttactatgagatgataaaactgcctactgtgaaggactaaaacttttattacctagtgccttctatgtgcatgaattttcttttgtggtgtagaatttttcttggttttttgttttgttttgcttgtttcttgttttgctttgttgtttatcttaattgttgttttttaattttctgggaaagatgaaatataatttagggaattcaataaaattgagattcatagatacgcttctatggctaaaacagagaaatgaggaattcaccatagtaatcttgagctggcatatgaatggttggatccatactttgcaggttttaaactaagtgttagtatgggtaagaaattttaaaggacatatgcatcttagttagggtttccattgctgtgaagagacaccatgaccaagacaactcgtataaagaacaccatttaattagggctggcttacagattcagaggtccagtccaccaccacattataggtagtgtgatggtttgtatatccttggaccatggagtggcaccatctaaaggtgtggccttgttgaaataggtgtgacctggttggaatgggtgtgtcactgtggatgtgggtataagatcctcacactagttgcctggaagtcagtcttccactagcagcctttggatgaagacatagaaccctcagctcttcctgcgccatgcctgcctggatactgccatgctcccaccttgatgataattgactgaacctctgaacctgtaagccagccccaattaaatgttgtttgttttataagacttgccttggtcatggtgtctgttcatagcagtaaaaccctgactaatacaggtggtcatatttgctaggaagaatataggaggatacatttttgcatctaatacagaatcagcaaggttggtggatttaccaccagaagtgttcaaaagcatgttagtgggccatttcatagagactttatcgtagttagtaaatgaaatacttcaattagatggtacagtaggccacattagccagattagaagattttggttaaaagattattgaaaaaactcatatgtttattaaagataccttggaattttttctataaaaatagagatttaatgcctagctcagggacaaagataaatcatatgtggtatgagcacacagtacatggatcttaattttggcaccaagattaaatagcaatagatatattttggaatatatctctggattaaatagctttagcaatagagacatattggaatccagactggaatgtatcagtaagcaagcacaagaataaccaaggatttgaagttatgaaatagttctaaagagcattaattgtcttaagatggaaagatcaaagaaattgagttatttattacagggaaggctattcaggcatagacggatggatacccaggcagagtgagcatgtggcaagcactctgagttgtctagtgctgggatgagatgatggaacgtattttatactgtctagaatgacagccattagccacatgtggctttcaaaacctagaaatgtgctagtccatctaaggaattcgatcctatttaacctaatttggtgttaacctaaaaattcattcacaagtgaaaggtagcatggttgaaaatactgactgctccttaatcttgtgggcagctctggactttggtctcatcttttttagatttatccaaactgtgaaagcaaatgggtagtatgaaaccctagtgtccactttgcagaatatacagttagtttatttgttttagcttcctactcatatcactaattcagtgcctaatgtgctcaaacttctcatcaaatggcatctgttaaaagttatatccatatgtcttacacgtttaattattgattacagaaattaattctggctgatgtcctcattctccaacaacaactacttctctttccaggtttccagaatacatttcaatatagaacatacctttgatgcccaccatagatttgtgtgctatgataagggaaatacttacattgtcttatatatttttatttaccttcataaattaaaaaaatgtaaatatgtaaaatgtaaattaaaaaataagaaacaaagtctagtcctaaatactaggacctagtctcatgttagtcttcacagattgattatggagcccttgtatacaaggtaggtgtggagctagaagctgtaattgttagagtttagtgccattaaagaaaaacctcaaaccccatacagcacaagtaagaaaattcccctctggtgctccagcttgtaacactccaaattaatttgggagaataaagcctgaactttgagcaccatcaaaaggatcatcctttaaaaatgttcacccagggaagtttgttcccagatgtagtcactaagctgtacagaacccatcacagctgtggtagagcagtgacgggggaacttgacctctcaagctagcacaactttttcatgttgttttgcagacatgcgaatatgaagagcttcaagatcaagaaccacagttctacatggcaactgagataaattattacatgctaggatttgattttctataaggaacctctatgaagccattgtaagaagttgagaaggaagccagacagtggtggtatatgcctttagtgccaggcagaggtaggaagatctccgtgagctatagattagttatgtgtacagagtgagttccaggacaaccatggctacacagagaaacactatctcaaaaagcaaaaataaataaatgaatgaataaatgaataaataaaacggagaatttgaagcctaacttgaaatagaggcatcagggaaagtgtttcagaactatggaacgttatctaattaaagctagagatactatatgtaaccagtccaaaagaaaggaatattgtgtctaagatattgtccctgaccagaaagaatggtccaagcgtgttaaagtggagctgataccatgctgagtttcagatgctggacatggtcctgtagtacttagtccttgccttgatggatttcagtgttctgcaaagtgtgagctgaagtctatctgtccctttagttatttgtgtcagctattttgccatagggacaagaggagtaaatgatagagctggcagcaaaaagtagacaaccttaatcaagcataggatactacttggatttttattttctctttatggtttttaaagtgtttttagtttgatataattgtagatttgcattgcagtataagcaattttagtaagaactacccaggttttcctaacaggaaaatctgatatcactataatacgatgtaacatagtgaccttaagcatatttctcccgttgttatttgatttgaatttgcatgtttggtgctatgaaatttagtcaattgtgtaaccatagtggccactgtatagattagtttcagtacagggattcttcatgttttccagtgtaaatatgccaatttgtgaaaaaagactcccttagtaggtagatttttgaaatggtgtgtcttttctatttgcattttctttcatcagcattttgtaatttttcaggatagtctcatatgcctatttcagttattatagaacaattgggaataatgtgtttcttagttcagttccccttgttaatacatagaaatgtgaccagttttgctacgttcttttttatccggagtcattccttgctcacctctctgttagaatttgtctacgtgattttgttgattgtagctttctacggataattatgccttctacaaatggtatggctcacttcttcttcccaattgttattgtttttatttctttttcttgcttaatggcatagcttttataatagaatttatagattcttgtttaataataattatggatgagagtaaacctgcattgtttctaatcttagagggatttttttttaaatgataagtagggtctcacctggcaggttttaaaactgttttcctttcctttcctttcctttcctttcctttcctttcctttcctttcctcctttcctcttttcctcctttcctcctttcctcctttcctcctttcctcctttcctttcctccttccttcctgcctgcctgcctgcctgcctgcctgcctgcctgcctgccttccttccttccttccttccttccttccttcctttctttctttctttctttctttctttctttctttctttctttctttttgccacattgaggaagtgtcatctattcctactttttacaataggtgctgaaatataaatcaaagctagatcctgaaggttctaactttatcagcacattagaatttaagaccatagaaccattagaaaccttctctgtttaaggcaccccagtgtagggtcttacctaggaaactggtataggtataaatggttgttagggaataaaggctggggtacactgttctgtgcaataaaggctggggtcgatgagtcctgaaattttgttgggacccaaacaagtcaaataaaaccattcaatataaggttgttcgcataacaggacaagactcagaagttagcaaatgcagcaggagtcaggcaacaacaatggcatcaaactcttatgcagattttaattcatttaaacttgtgagagtttgttttgtgatctaggttgtagtcacacttggtgaattttctaaggaaacctccccgtgtcttctgctcttgctgactaattgtgctggccatttctttctttttttgtaatattttttattacatattttcctcaattacatttccaatgctatcccaaaagtcccccaataccctctacccacttccctacccacccattcccatttttttggccctggcgttcccctgtactggggcatatacagtttgcgtgtccaatgggcctctctttccagtgatggccgactaggccatcttttgatacatatgcagctagagtcaagagctccggggtactggttagttcataatgttgttccatctatagggttgcagatccctttaactccttgggtactttctctagctcctccattgggagccctgtgctccatcgaatagctgacagtgagcatccacttctgtgtttgctaggccccggcatagtctcacaagagacagctacatctgggtcctttcaacaaaatcttgctagtgtatgcaatgatgttagcatttggaagctgattatggggtggatccctggatatggcagtctctagatggtccatcctttcgtctcagctccaaactttgtttctgtaactccttccatgggtgttttgttcccaattctaaggaggggcatagtgtccacacttcagttttcattcttcttgagtttcaggtgtttagcaaattgtatcttatatcttgggtatgctaagttttggactaatatccacttatcagtgagtacatattgtgtgagttcctttgtgaatgtgttacctcactcaggatgatgcactccaggtccatccatttggctaggaatttcataaattcattctttttaatagctgagtagtactccattgtgtaaatgtaccacattttctgtatccattcctctgtggaggggcatctgggttctttccagcttctggctattataaataaggctgctatgaacatagtggagcatgtgtccttctgaccggttgggacatcttctggatatatgcccaggagaggtattgctggatcctccggtagtgctatgtccaattttctgaggaaccgccagactgatttctagagtggttgtacaagcttgcaatcccaccaacaatggaggagtgttcctcttttccacatcctcgccagcatctgctgtcacctgaatttttgatcttagccattctgactggtgtgaggtgaaatctcagggttgttttgatttgcatttccctgatgattaaggatgttgaacatttttcaggtgcttctctgccattcgatattcctcaggtgagaattctttgttcagttctgagccccattttttaatggggttatttaattttctggagtccaccttcttgagttctttatatatgttggatattagtcccctatctgatttaggataggtaaagatcctttcccaatctgttggtggtctttttgtcttattgacagtatcttttgccttgcagaagctttggagtttcatgaggtcccatttgtcaattctggatcttacagcacaagccattgctgttctattcaggaatttttcccctgtgcccatatcttcaaggcttttccccactttctcctctataagtttcagtgtctctggttttatgtgaagttccttgatccacttagatttgaccttagtacaaggagatagaaatggatcaattcacattcttctacatgataacaaccagttgtgccagcaccatttgttgaaaatgcagtctttcttccactggatggttttagctcccttgtcgaagatcaagtgaccataggatcaagttaacgatctaaacagtcccatatcccctaaagaaatagaagcagtcattaatagtctcccagccagaaaaagcccgggaccagatgggtttagtgcagagttctaccagaccttcaaaaaagatctaattccagttcttcacaaactattccacaaaatagaagcagaaggaactctacccaactcattctatgaagccacaattactctgatacctaaaccacagaaagatccaacaaaggtagagaacttcagaccaatttcccttatgaatattgatgcaaaaatactcaataaaattctcgctaaccgaatccaagaacacattaaaacaatcatccatcctgaccaaataggttttattccagggatgcagggatggtttaatatacggaaatccatcaacgtaatccattatataaacaaactcaaagacaaaaaccacatgatcatctccttagatgtgaaaaaagcattcgacaagatccaacacccattcatgataaaagtcttggaaagatcaggaattcaaggcccatacctaaccatgataaaagcaatctacagcaaaccagtagccaacatcaaagtaaatggtgagaagctggaagcaatcccactacaatcagggactagacaaggctgtccactctccccatacctattcaacattttacttgaagactagccagaacaattcgacaacaaaaggagatcaaggggatacaaattggaaaagaggaagtcaaaatatcacttttttgcagatgatatgatagtatatataagtgaccctaaaaattccaccagaaaactcctaaacctgataaacagcttcaatgaagtagctggatataaaattaactcaaacaagtcaatggcctttctctacacaaagaataaacaggctgagaaagaaattagggaaacaacacccttctcaatagtcacaaataatataaaatatcttggcgtgaccctaactaaggaagtgaaaaatctgtatgattaaaaacttcaagtctctgaagaaagaaattaaagaagatctcagaagatggaaagatctcccatgctcatggattggcaggatcaacattgtaaaactggctatcttgccaaaagcaatctacagattcaatgcaatccccatcaaaattccaactcaattcttcaacgaattagaaagggcaatcggcagattcatctggaatatcaaaaaatggaggatagcaaaaactcttctcaaggataaaagaacctctggtggaatcaccatgcctgacctaaagctttactacagagcaattgtgataaaaactgcatggtactggtatactgacagataagtagaccaatggaatagaattgaagacccagaaatggccatttcttttataccattctgggctacaactagtaactctatcatttgcaaagtaaattattgaagatagtaattctagtttggcacccctcaatttattctcatggctcttggcttttttttttgttgttgttatttgaaactctattgttatatgcacttttatgattattatgttattactgccatatctaccactttatcattataaagtatctctttaaactcttataacttttatttctcacaaatatactttatagccactttatttgtatcaattggcttttacatggtgcaacatattttggtctttcattttatgctacttattaaattcaaaatgtgtttttatagggcagcattttttttattgtttgtgataacctctcagttttagctgtcagaggacaacctacaagagtcaattctcttgtatgttttgggttcctggcatccagatcaggtttgttaaccttgaaaacaaatgcttttatctcctgggccatctcactttcctgttttagtacatttaaaacactctgcttcttctgcttttcttggtttttgataaaaactgacaccagtcaagttgtttattcctccctggataaatgctgctttttactccattgccttcaaagccatcctttgctttcaaatgttaactatgagtcctctcagaattgatttctttagattgatcgcattttaagtttatttacttgttataacagtacacttacatttttcaccaaatttcaggaacttttcaaccataactttttaagatccactctccctctcttcatcttctggtactccaatgatgtggtatgctagttttctccctgacttcacaggagggaacatacatttaatactgtgaatctgatttttaaaacatgatcaaaaaccagacaagtaaaaatgacctggctaaggaaatcatataaatgggaaattattgtcttgtttgcctaagttgtgatggtgtcaaacaaccttcaaaatatctatatttatattgataggcatattctactctagctgtaattggagaaggctgtctttgaggtaaacagtggtaaatgcagaaattcatggttcttctaaatgctgacaaaatgtgacagtagaatgcttatccctgcacaagacagttctaccttctcctaaaactgaaggaacagcatgcaaaaggaggtggaaacaatggaagagctcaaagaaaggaagaagggctacaaatgcctcgcgtgggcaggacacagccactgtggtcagtgtttgaaagcagctgtgattacctgtaagggttctacctgcacaagactggctctataaacccccagctgtcgatcgagggacacgccagattctgggagaaggattcagtggccttcgtgtgtccacattgatcaacctgttgggttctgatggacagttccaaacccatgagcacaaagctgaccctggttaaacaaagtggcccataaaataaaacaagaagacatgtatatagaaaggtgtttgtagggagggaacagagctgacatagtgggaagaaaaagaacaaaggtcatgtgaaaataatcagaatgccttgcacatttgcatgaaactgttaagaacaaatttaatttataaaactaaaacaaatagctttgttgttgttatcctatatactcacaaatctcctttagactttgttcagccatttctctctatcattatattcatagatttgattgatttctcctacgattttctatcttcattactctttaccttttggcttgtccattgcttatgtatttatatttatttgatataggtatagatatagatatagagatagagatatagagatatagagatatagagacatagagacatagagacatatagagagagatagagatacttgtttgagaaatacatctatagtactaagtttacctatatttaaaaatatatatgagtactatatttacatcattgtcatccctacattatcccttttccaacttctcctgtgtcccctatttattcgctgctaagttcagaacttctcctttttatagtaaaaaaacaaaaaactatatgcatatacacatacgcatgtgtaaataccaccttctgagtttacttagcattgcccactgttcatggctgactatttgagattagatttttctattagaggaattatcataaagaaaacgtattctccctcaattagccattaattgttctgcattagtactggggacttgtgagatctcccccccccccgttcccctatccaacattgtaatgtcatctgattttgtcatagggcatatctggtttagctgacaatattgttaagagttcatgggtgcaactctctatcatgcatagacggcactatcatgtaacagacattttgatcctttgcctctcttccatgatgttctctgacaaagttttctgtagaggtgtcagttggcgaggggcaccccactgttaattgttctcctcattttgagcatttgtggacttttgctatggtctccacctgctgtaaaaagaagcttctttgatgagaaagcaatgcttactataaatataagggtaggtatttaggatgtatttgggaattatactggttgagagaattttcagttgtatatctatgtattctctgatcaggtcaacaagtatagttcactagatttatagtatcaggtgtgattccctcattttaggtgagccatgagtgcaaattggctgttggttactgccaagacacttgccactgttgcacccttggggatatctggacaggctggtaactgctttagttcactggctttacagttagataaaacttttaattacttttcttcattgatccagctcaagtctttgaagtcatgtttacaaaatacatagagtattcaacaatgaagtcttatcttctatttctgggaggcaaccaaaggcaatggaaatagcctgtgtacgtatatgtgtgtgtgtgtgtgtgtgtgtgtgtgtgtgtgtgtgtgtgtgtatgtatgtatatgtatatatatttgaattctcctggaggctcctgtccaataacctgaagagagagttctcatggttttttttttgctagatagtctattgctctttggaagggcatttcacactcaaatggcataacttcatgtgacttatgtcatatatatgccataaattttaagtaagcattatatagcattttccagtggattttaaaataatctttattgtccttgatcctgcttcctaccttcacccttaatactacaacatcaaaacagaaaacattaaatttctgaagagattgaacactagaagatggaaggaaaggtattgtatgttcatagattagcagaactaatactttgatgatgaccatcctaccaaacacaatttacagaatcaaatgaattctagtcaaaatttctgcaacattgttcagataaatagaaaaaatagacaagccccttccgctccactcgagccccgggctaccttgccagcagagtcttgcccaacacccgcaagggcccacacaggactccccacgggatcctaagacctctggtgagtggaacacagcgcctgccccaatccaatcgcgcggaacctgagactacggtacatggggaagcaggctacccaggccagatctggggcacaagccccttccgctccactcgagccccgggctaccttgccagcagagtcccctgacacccgcaagggcccacacaggattccacacgggatcctaagacctctagtgagtggaacacaacttctgccaggagtctggttcgaacaccagatatctgggtaccttccctgcaagaagagagcttgcctgcagagaatactctgcccactgaaactaaggagagtgctaccctccaggtctgcttatagaggctaacagagtcacctgaagaacaagctcttaacagtgacaactaaaacagctagcttcagagattaccagatggcgaaaggcaaacgtaagaatcctactaacagaaatcaagaccactcaccatcatcagaacgcagcactcccaccccacctagtcctgggcaccccaacacaaccgaaaatctagacccagatttaaaaacatttctcatgatgatgatagaggacatcaagaaggactttcataagtcacttaaagaattacaggagagcactgctaaagagttacaggcccttaaagaaaagcaggaaaacacaaccaaacaggtagaagtccttaaagaaaaacaggaaaacacatccaaacaggtgatggaaatgaacaaaaccatactagaactaaaaggggaagtagacacaataaagaaaacccaaagcgaggcaacgctggagatagaaaccctaagaaagagatctggaaccatagatgcgagcatcagcaacaggatacaagaaatggaagagagaatttcaggcgcagaagattccatagagaacatcggcacaacaatcaaagataatacaaaatgcaaagannnnnnnnnnnnnnnnnnnnnnnnnnnnnnnnnnnnnnnnnnnnnnnnnnnnnnnnnnnnnnnnnnnnnnnnnnnnnnnnnnnnnnnnnnnnnnnnnnnnnnnnnnnnnnnnnnnnnnnnnnnnnnnnnnnnnnnnnnnnnnnnnnnnnnnnnnnnnnnnnnnnnnnnnnnnnnnnnnnnnnnnnnnnnnnnnnnnnnnnnnnnnnnnnnnnnnnnnnnnnnnnnnnnnnnnnnnnnnnnnnnnnnnnnnnnnnnnnnnnnnnnnnnnnnnnnnnnnnnnnnnnnnnnnnnnnnnnnnnnnnnnnnnnnnnnnnnnnnnnnnnnnnnnnnnnnnnnnnnnnnnnnnnnnnnnnnnnnnnnnnnnnnnnnnnnnnnnnnnnnnnnnnnnnnnnnnnnnnnnnnnnnnnnnnnnnnnnnnnnnnnnnnnnnnnnnnnnnnnnnnnnnnnnnnnnnnnnnnnnnnnnnnnnnnnnnnnnnnnnnnnnnnnnnnnnnnnnnnnnnnnnnnnnnnnnnnnnnnnnnnnnnnnnnnnnnnnnnnnnnnnnnnnnnnnnnnnnnnnnnnnnnnnnnnnnnnnnnnnnnnnnnnnnnnnnnnnnnnnnnnnnnnnnnnnnnnnnnnnnnnnnnnnnnnnnnnnnnnnnnnnnnnnnnnnnnnnnnnnnnnnnnnnnnnnnnnnnnnnnnnnnnnnnnnnnnnnnnnnnnnnnnnnnnnnnnnnnnnnnnnnnnnnnnnnnnnnnnnnnnnnnnnnnnnnnnnnnnnnnnnnnnnnnnnnnnnnnnnnnnnnnnnnnnnnnnnnnnnnnnnnnnnnnnnnnnnnnnnnnnnnnnnnnnnnnnnnnnnnnnnnnnnnnnnnnnnnnnnnnnnnnnnnnnnnnnnnnnnnnnnnnnnnnnnnnnnnnnnnnnnnnnnnnnnnnnnnnnnnnnnnnnnnnnnnnnnnnnnnnnnnnnnnnnnnnnnnnnnnnnnnnnnnnnnnnnnnnnnnnnnnnnnnnnnnnnnnnnnnnnnnnnnnnnnnnnnnnnnnnnnnnnnnnnnnnnnnnnnnnnnnnnnnnnnnnnnnnnnnnnnnnnnnnnnnnnnnnnnnnnnnnnnnnnnnnnnnnnnnnnnnnnnnnnnnnnnnnnnnnnnnnnnnnnnnnnnnnnnnnnnnnnnnnnnnnnnnnnnnnnnnnnnnnnnnnnnnnnnnnnnnnnnnnnnnnnnnnnnnnnnnnnnnnnnnnnnnnnnnnnnnnnnnnnnnnnnnnnnnnnnnnnnnnnnnnnnnnnnnnnnnnnnnnnnnnnnnnnnnnnnnnnnnnnnnnnnnnnnnnnnnnnnnnnnnnnnnnnnnnnnnnnnnnnnnnnnnnnnnnnnnnnnnnnnnnnnnnnnnnnnnnnnnnnnnnnnnnnnnnnnnnnnnnnnnnnnnnnnnnnnnnnnnnnnnnnnnnnnnnnnnnnnnnnnnnnnnnnnnnnnnnnnnnnnnnnnnnnnnnnnnnnnnnnnnnnnnnnnnnnnnnnnnnnnnnnnnnnnnnnnnnnnnnnnnnnnnnnnnnnnnnnnnnnnnnnnnnnnnnnnnnnnnnnnnnnnnnnnnnnnnnnnnnnnnnnnnnnnnnnnnnnnnnnnnnnnnnnnnnnnnnnnnnnnnnnnnnnnnnnnnnnnnnnnnnnnnnnnnnnnnnnnnnnnnnnnnnnnnnnnnnnnnnnnnnnnnnnnnnnnnnnnnnnnnnnnnnnnnnnnnnnnnnnnnnnnnnnnnnnnnnnnnnnnnnnnnnnnnnnnnnnnnnnnnnnnnnnnnnnnnnnnnnnnnnnnnnnnnnnnnnnnnnnnnnnnnnnnnnnnnnnnnnnnnnnnnnnnnnnnnnnnnnnnnnnnnnnnnnnnnnnnnnnnnnnnnnnnnnnnnnnnnnnnnnnnnnnnnnnnnnnnnnnnnnnnnnnnnnnnnnnnnnnnnnnnnnnnnnnnnnnnnnnnnnnnnnnnnnnnnnnnnnnnnnnnnnnnnnnnnnnnnnnnnnnnnnnnnnnnnnnnnnnnnnnnnnnnnnnnnnnnnnnnnnnnnnnnnnnnnnnnnnnnnnnnnnnnnnnnnnnnnnnnnnnnnnnnnnnnnnnnnnnnnnnnnnnnnnnnnnnnnnnnnnnnnnnnnnnnnnnnnnnnnnnnnnnnnnnnnnnnnnnnnnnnnnnnnnnnnnnnnnnnnnnnnnnnnnnnnnnnnnnnnnnnnnnnnnnnnnnnnnnnnnnnnnnnnnnnnnnnnnnnnnnnnnnnnnnnnnnnnnnnnnnnnnnnnnnnnnnnnnnnnnnnnnnnnnnnnnnnnnnnnnnnnnnnnnnnnnnnnnnnnnnnnnnnnnnnnnnnnnnnnnnnnnnnnnnnnnnnnnnnnnnnnnnnnnnnnnnnnnnnnnnnnnnnnnnnnnnnnnnnnnnnnnnnnnnnnnnnnnnnnnnnnnnnnnnnnnnnnnnnnnnnnnnnnnnnnnnnnnnnnnnnnnnnnnnnnnnnnnnnnnnnnnnnnnnnnnnnnnnnnnnnnnnnnnnnnnnnnnnnnnnnnnnnnnnnnnnnnnnnnnnnnnnnnnnnnnnnnnnnnnnnnnnnnnnnnnnnnnnnnnnnnnnnnnnnnnnnnnnnnnnnnnnnnnnnnnnnnnnnnnnnnnnnnnnnnnnnnnnnnnnnnnnnnnnnnnnnnnnnnnnnnnnnnnnnnnnnnnnnnnnnnnnnnnnnnnnnnnnnnnnnnnnnnnnnnnnnnnnnnnnnnnnnnnnnnnnnnnnnnnnnnnnnnnnnnnnnnnnnnnnnnnnnnnnnnnnnnnnnnnnnnnnnnnnnnnnnnnnnnnnnnnnnnnnnnnnnnnnnnnnnnnnnnnnnnnnnnnnnnnnnnnnnnnnnnnnnnnnnnnnnnnnnnnnnnnnnnnnnnnnnnnnnnnnnnnnnnnnnnnnnnnnnnnnnnnnnnnnnnnnnnnnnnnnnnnnnnnnnnnnnnnnnnnnnnnnnnnnnnnnnnnnnnnnnnnnnnnnnnnnnnnnnnnnnnnnnnnnnnnnnnnnnnnnnnnnnnnnnnnnnnnnnnnnnnnnnnnnnnnnnnnnnnnnnnnnnnnnnnnnnnnnnnnnnnnnnnnnnnnnnnnnnnnnnnnnnnnnnnnnnnnnnnnnnnnnnnnnnnnnnnnnnnnnnnnnnnnnnnnnnnnnnnnnnnnnnnnnnnnnnnnnnnnnnnnnnnnnnnnnnnnnnnnnnnnnnnnnnnnnnnnnnnnnnnnnnnnnnnnnnnnnnnnnnnnnnnnnnnnnnnnnnnnnnnnnnnnnnnnnnnnnnnnnnnnnnnnnnnnnnnnnnnnnnnnnnnnnnnnnnnnnnnnnnnnnnnnnnnnnnnnnnnnnnnnnnnnnnnnnnnnnnnnnnnnnnnnnnnnnnnnnnnnnnnnnnnnnnnnnnnnnnnnnnnnnnnnnnnnnnnnnnnnnnnnnnnnnnnnnnnnnnnnnnnnnnnnnnnnnnnnnnnnnnnnnnnnnnnnnnnnnnnnnnnnnnnnnnnnnnnnnnnnnnnnnnnnnnnnnnnnnnnnnnnnnnnnnnnnnnnnnnnnnnnnnnnnnnnnnnnnnnnnnnnnnnnnnnnnnnnnnnnnnnnnnnnnnnnnnnnnnnnnnnnnnnnnnnnnnnnnnnnnnnnnnnnnnnnnnnnnnnnnnnnnnnnnnnnnnnnnnnnnnnnnnnnnnnnnnnnnnnnnnnnnnnnnnnnnnnnnnnnnnnnnnnnnnnnnnnnnnnnnnnnnnnnnnnnnnnnnnnnnnnnnnnnnnnnnnnnnnnnnnnnnnnnnnnnnnnnnnnnnnnnnnnnnnnnnnnnnnnnnnnnnnnnnnnnnnnnnnnnnnnnnnnnnnnnnnnnnnnnnnnnnnnnnnnnnnnnnnnnnnnnnnnnnnnnnnnnnnnnnnnnnnnnnnnnnnnnnnnnnnnnnnnnnnnnnnnnnnnnnnnnnnnnnnnnnnnnnnnnnnnnnnnnnnnnnnnnnnnnnnnnnnnnnnnnnnnnnnnnnnnnnnnnnnnnnnnnnnnnnnnnnnnnnnnnnnnnnnnnnnnnnnnnnnnnnnnnnnnnnnnnnnnnnnnnnnnnnnnnnnnnnnnnnnnnnnnnnnnnnnnnnnnnnnnnnnnnnnnnnnnnnnnnnnnnnnnnnnnnnnnnnnnnnnnnnnnnnnnnnnnnnnnnnnnnnnnnnnnnnnnnnnnnnnnnnnnnnnnnnnnnnnnnnnnnnnnnnnnnnnnnnnnnnnnnnnnnnnnnnnnnnnnnnnnnnnnnnnnnnnnnnnnnnnnnnnnnnnnnnnnnnnnnnnnnnnnnnnnnnnnnnnnnnnnnnnnnnnnnnnnnnnnnnnnnnnnnnnnnnnnnnnnnnnnnnnnnnnnnnnnnnnnnnnnnnnnnnnnnnnnnnnnnnnnnnnnnnnnnnnnnnnnnnnnnnnnnnnnnnnnnnnnnnnnnnnnnnnnnnnnnnnnnnnnnnnnnnnnnnnnnnnnnnnnnnnnnnnnnnnnnnnnnnnnnnnnnnnnnnnnnnnnnnnnnnnnnnnnnnnnnnnnnnnnnnnnnnnnnnnnnnnnnnnnnnnnnnnnnnnnnnnnnnnnnnnnnnnnnnnnnnnnnnnnnnnnnnnnnnnnnnnnnnnnnnnnnnnnnnnnnnnnnnnnnnnnnnnnnnnnnnnnnnnnnnnnnnnnnnnnnnnnnnnnnnnnnnnnnnnnnnnnnnnnnnnnnnnnnnnnnnnnnnnnnnnnnnnnnnnnnnnnnnnnnnnnnnnnnnnnnnnnnnnnnnnnnnnnnnnnnnnnnnnnnnnnnnnnnnnnnnnnnnnnnnnnnnnnnnnnnnnnnnnnnnnnnnnnnnnnnnnnnnnnnnnnnnnnnnnnnnnnnnnnnnnnnnnnnnnnnnnnnnnnnnnnnnnnnnnnnnnnnnnnnnnnnnnnnnnnnnnnnnnnnnnnnnnnnnnnnnnnnnnnnnnnnnnnnnnnnnnnnnnnnnnnnnnnnnnnnnnnnnnnnnnnnnnnnnnnnnnnnnnnnnnnnnnnnnnnnnnnnnnnnnnnnnnnnnnnnnnnnnnnnnnnnnnnnnnnnnnnnnnnnnnnnnnnnnnnnnnnnnnnnnnnnnnnnnnnnnnnnnnnnnnnnnnnnnnnnnnnnnnnnnnnnnnnnnnnnnnnnnnnnnnnnnnnnnnnnnnnnnnnnnnnnnnnnnnnnnnnnnnnnnnnnnnnnnnnnnnnnnnnnnnnnnnnnnnnnnnnnnnnnnnnnnnnnnnnnnnnnnnnnnnnnnnnnnnnnnnnnnnnnnnnnnnnnnnnnnnnnnnnnnnnnnnnnnnnnnnnnnnnnnnnnnnnnnnnnnnnnnnnnnnnnnnnnnnnnnnnnnnnnnnnnnnnnnnnnnnnnnnnnnnnnnnnnnnnnnnnnnnnnnnnnnnnnnnnnnnnnnnnnnnnnnnnnnnnnnnnnnnnnnnnnnnnnnnnnnnnnnnnnnnnnnnnnnnnnnnnnnnnnnnnnnnnnnnnnnnnnnnnnnnnnnnnnnnnnnnnnnnnnnnnnnnnnnnnnnnnnnnnnnnnnnnnnnnnnnnnnnnnnnnnnnnnnnnnnnnnnnnnnnnnnnnnnnnnnnnnnnnnnnnnnnnnnnnnnnnnnnnnnnnnnnnnnnnnnnnnnnnnnnnnnnnnnnnnnnnnnnnnnnnnnnnnnnnnnnnnnnnnnnnnnnnnnnnnnnnnnnnnnnnnnnnnnnnnnnnnnnnnnnnnnnnnnnnnnnnnnnnnnnnnnnnnnnnnnnnnnnnnnnnnnnnnnnnnnnnnnnnnnnnnnnnnnnnnnnnnnnnnnnnnnnnnnnnnnnnnnnnnnnnnnnnnnnnnnnnnnnnnnnnnnnnnnnnnnnnnnnnnnnnnnnnnnnnnnnnnnnnnnnnnnnnnnnnnnnnnnnnnnnnnnnnnnnnnnnnnnnnnnnnnnnnnnnnnnnnnnnnnnnnnnnnnnnnnnnnnnnnnnnnnnnnnnnnnnnnnnnnnnnnnnnnnnnnnnnnnnnnnnnnnnnnnnnnnnnnnnnnnnnnnnnnnnnnnnnnnnnnnnnnnnnnnnnnnnnnnnnnnnnnnnnnnnnnnnnnnnnnnnnnnnnnnnnnnnnnnnnnnnnnnnnnnnnnnnnnnnnnnnnnnnnnnnnnnnnnnnnnnnnnnnnnnnnnnnnnnnnnnnnnnnnnnnnnnnnnnnnnnnnnnnnnnnnnnnnnnnnnnnnnnnnnnnnnnnnnnnnnnnnnnnnnnnnnnnnnnnnnnnnnnnnnnnnnnnnnnnnnnnnnnnnnnnnnnnnnnnnnnnnnnnnnnnnnnnnnnnnnnnnnnnnnnnnnnnnnnnnnnnnnnnnnnnnnnnnnnnnnnnnnnnnnnnnnnnnnnnnnnnnnnnnnnnnnnnnnnnnnnnnnnnnnnnnnnnnnnnnnnnnnnnnnnnnnnnnnnnnnnnnnnnnnnnnnnnnnnnnnnnnnnnnnnnnnnnnnnnnnnnnnnnnnnnnnnnnnnnnnnnnnnnnnnnnnnnnnnnnnnnnnnnnnnnnnnnnnnnnnnnnnnnnnnnnnnnnnnnnnnnnnnnnnnnnnnnnnnnnnnnnnnnnnnnnnnnnnnnnnnnnnnnnnnnnnnnnnnnnnnnnnnnnnnnnnnnnnnnnnnnnnnnnnnnnnnnnnnnnnnnnnnnnnnnnnnnnnnnnnnnnnnnnnnnnnnnnnnnnnnnnnnnnnnnnnnnnnnnnnnnnnnnnnnnnnnnnnnnnnnnnnnnnnnnnnnnnnnnnnnnnnnnnnnnnnnnnnnnnnnnnnnnnnnnnnnnnnnnnnnnnnnnnnnnnnnnnnnnnnnnnnnnnnnnnnnnnnnnnnnnnnnnnnnnnnnnnnnnnnnnnnnnnnnnnnnnnnnnnnnnnnnnnnnnnnnnnnnnnnnnnnnnnnnnnnnnnnnnnnnnnnnnnnnnnnnnnnnnnnnnnnnnnnnnnnnnnnnnnnnnnnnnnnnnnnnnnnnnnnnnnnnnnnnnnnnnnnnnnnnnnnnnnnnnnnnnnnnnnnnnnnnnnnnnnnnnnnnnnnnnnnnnnnnnnnnnnnnnnnnnnnnnnnnnnnnnnnnnnnnnnnnnnnnnnnnnnnnnnnnnnnnnnnnnnnnnnnnnnnnnnnnnnnnnnnnnnnnnnnnnnnnnnnnnnnnnnnnnnnnnnnnnnnnnnnnnnnnnnnnnnnnnnnnnnnnnnnnnnnnnnnnnnnnnnnnnnnnnnnnnnnnnnnnnnnnnnnnnnnnnnnnnnnnnnnnnnnnnnnnnnnnnnnnnnnnnnnnnnnnnnnnnnnnnnnnnnnnnnnnnnnnnnnnnnnnnnnnnnnnnnnnnnnnnnnnnnnnnnnnnnnnnnnnnnnnnnnnnnnnnnaataaacaggctgagaaagaaattagggaaacaacacctttctcaatagtcacaaataatataaaatatcttggcgtgactctaactaaggaagtgaaagatctgtatgataaaaacttcaaatctctgaagaaagaaattaaagaagatctcagaagatggaaaaatctcccatgctcatggattggcaggatcaacattgtaaaaatggctatcttgccaaaagcaatctacagattcaatgcaatccccatcaaaattccaactcaattcttcaaggaattggaaggagcaatttgcaaatttgtctggaataacaaaaaacctaggatagcaaaaagtcttctcaaggataaaagaacttctggtggaatcaccatgccagacctaaagctttactacagagcaattgtgataaaaactgcatggtactggtatagagacagacaagtagaccaatggaatagaattgaagacccagaaatgaacccacacacctatggtcacttgatcttcaacaagggagctaaaaccatccagtggaagaaagacagcattttcaacaattggtgctggcacaactggttcttatcatgtagaaaaatcgaatctatccatacttatctccttgtactaaggtcaaatctaagtggatcaaagaacttcacataaaaccagagacactgaaacttatagaggagaaagtggggaaaagccttgaagatatgggcacaggggaaaaattcctgaacagaacagcaatggcttgtgctgtaagatcgagaattgacaaatgggacctaatgaaactccaaagtttctgcaaggcaaaagacaccgtcaacaagacaaaaagaccaccaacagattgggaaaggatctttacctatcctaaatcagataggggactaatatccaacatatataaagaactcaagaaggtggacttcagaaaatcaaacaaccccattaaaaaatggggctcagaactgaacaaagaattctcacctgaggaataccgaatggcagagaagcacctgaaaaaatgttcaacatccttaatcatcagggaaatgcaaatcaaaacaaccctgagattccacctcacaccagtcagaatggctaagatcaaaaattcaggtgacagcagatgctggcgtggatgtggagaaagaggaacactcctccattgttggtgggattgcaggcttgtacaaccactctggaaatcagtctggcggttcctcagaaaattggacatagtactaccggaggatccagcaatacctctcctgggcatatatccagaagatgccccaactggtaagaaggacacatgctccactatgttcatagcagccttatttataatagccagaagctggaacgaacccagatgcccctcaacagaggaatggatacagaaaatgtggtacatctacacaatggagtactactcagctattaaaaagaatgaatttatgaaattcctagccaattggattgacctggagggcatcatcctgagtgaggtaacacattcacaaaggaactcacacaatatgtactcactgataagtggatattagccccaaacctaggattcccaagatataaggtataatttgctaaacacatgaaactcaagaagaatgaagactgaagtgtggacactatgcccctccttagaattgggaacaaaacacccatggaaggagttacaaagacaaagtttggagctgagatgaaaggatggaccatgtagagactgccatatccaggggtccaccccataaccagcatccaaacgctgacaccattgtatatactagcaagattttatcgaaaggacccagatgtagctgtctcttgtgagactatgctggggcctagcaaacacagaagtggatgctcacagtcagctaatggatagatcacagggctcccaatggaggagctagagaaagtacccaaggagctaaagggatctgcaaccctataggtggaacaacattatgaactaaccagtaccctggagctcttgtctctagctgcatatgtatcaaaagatgacctagtcggccatcactggaaagagaggcccattggacacgtaaactttatatgccccagtacaggggaacgccagggccaaagagggggagtgggtgggtatgggggacttttggtatagcattggaaatgtaaatgagctaaatacctaataaaaatggaaaaaaatatttaaaaaaaaaagaaagaaaaaataaatcctaaaattcatataggcccaagaaagactcctgatagtgaaggcaaccctgagaaaaaacaaggttgcttgagaaattaccattccagatttcaagctctatcattttcaactcttttgctgagcttttcagtgtgtttgtggaggatggggtagtttgatggttgttatatttctggtttgataattatcacgtggtcattttaattattttggctaatattttctaattttccatttgtttcaagagaattaattcacaattgcttacgaagcatttttatggtggctggttgaaaatctttgtcacacagctccaatattacattggtttggacactggtatccattggctgtcttttctcacttgagatgtgatttccctggatgagaagtttaattgtatccagaatattatgatatatttgaatattatgaaactctagacattattcagacttcttgacccaactaggattacttggccatgaaagttgaatttttcccactggtgtttggctcaagtaggtcaggtattgtcaaaagagatttgtgtgtctttttgtttcctgtattctggataagaggcacagacctttcttggcatttgttgtcaatgcctgcagatgcttctggctcacaggtttttatgttctcctggaaacaacaacaaaacccattagaagcctgcacagtgatttttctcaagtcccagtgtcccttggcagtgtaacattgcctttctacatctaaggattcccagaagcgctattacctgtccaatgtatttaactgtaaggaggaggctctgtgaagaatggagttattctggttttgccaaacctggaggtctaatatattgtgttttaatatttttgtttatatttagttttctagctaactaattttttttctttttaatttttgtgcaaaatcagataagtccaattcccaaagattttgatttagttgctatttgaaaagctctggaatatacatttttttacagtctggtcaagctgggtatgaagctttctatttagactgtaataactactgaaggcaacaaggcatctatctttctttgggtaagctatttttcaacaataaagaatgaaggaaaccattgcagtgcttagttttgagtcagcttggcatatgctagaattatcaaggcagaaggaactttagttgagaaaatgcatccatcattttggtctgtagacaggccaatgattgatgtggaagagctcagcccactatgggtggtacctctctaggcatgtggttgtgagagaaagaaaacagactgagcaaaccacagtaatcatgctcataagccatgtctttccacggcttgtgcttcagatcctgcctccaggtttcagcactgagtttttttaccctgatttctcttcatgactataaccactaagcctactaagccctttcctccccaacttatttctgatcatgggctcaagtcccagtgtcccttggcagtgtaacattgcctttctacatctaaggattcccagaagcatagtaatatcaacttgactggtggcacaagataaaatcatctgaaatgagagaacctcaatctaaaaaatgcctccataagactgggttgtattcaaccctgtactgcatcttcttaattgtgattgatggcatcagctcattgtgaatattgtcattcctgggctggtggtcctgggttctataagaaagcaggctgaacaaacaatgaggagcaagccagaaagcagtacccctccatgttctctgcatgggctcctgcctccaggttcctaccctgtttgagttcctgactgcttccttcagtgatgaacagtgctatggaagtatttgtcaaataaaccctttccttcccaagttgctttggtcatggcgttttaacacagcaatagtaaccctaacaagactcttacaacagtagtaagcaaactaagacaaccatcaaacttctttttaaaaaacagagttttgttttccacgattttgccaagaaaatacccagaacattctgcactatactctgtgaacttgagtatactttccttatcatatcactgacctagataggggatcactgcagagtagcctcttgtgtatacttgtatgtctgtctcataggaaacaaaattgtgcttatttgtaaaaatatatgccatttatttggaatatttagctataaaaacaactcatcttatagatgcctacagaaactattttgtaggatgtccttacattataagctacaaaaacattcagagaacatatttaagaatccaaggaggactcttatatttataactcatttctgttataatgggtagatatttttcttttgtgagaagtctcatgtgggaacctaatttgaatatttcttatttaactataactttgttaattaaaaagtaaattgtgttggcaaataatagtttctgttggctaagttgacacattttctctagcttatgctttttaagaactgcctgcctgttgataaactatgtattgttatgtcaaccaagtcttatttaactatttatttacatttttattatgtctgtttgcacacgcaggtgaagttcagggatcaaactcagacattattctcaggagccattcttggttttgaagataatatttctagggcttcggacccactgatcaggccaggctgactggccagtggcctgggtgtctccagcatcccagccctgggattacaaatgcactgaagcaagcttggcttttgtacatggacacttctgatgagattaaagttcttaggttgtaaagtaagcaatttagcattttacagatggagagctctctctactatgaaggaaatgctttgtcgtttgattctacaaatatctgaccattaagacccaagaactgtaacactttatatttggaacttgccattcagagtatgtgatggtactgatgggctcttcttacccaaggtttcactttctgctatctctttaaaaattcctgagcaaacgatcattcgaattatgattacacagaacatattttaattactcttaaaaattagcaatctcaaacccagatcatggactgcctggaggtaaataattgacttactgtttataatccattatcatgtactggtaaagtaaattttcttttttaattaaacaacatacctttgacagagtgtcattgcctttccnnnnnnnnnnnnnnnnnnnnctccctccctccctccctccttcactcccttccttgcttccttccttcccctctttctttctttctttctttctttctttctttctttctttctttctttctttctttctttctttctttcttttttacttacttattttcatttaccaggtagtcagtcaggcaaaaatagtgaagttcattgtgcaaagggtaccttccctgttagcatgggttaaagatagccggctctgtactaggtagaagaagaaactgatgttgtattcttatagagtatgaagagtcccactagagagaaagtctactacttggacatctaactaatgcactaaaattatcttgttcatatttatagtgaaattatgaaaataaaatcaacatttcatattttcaatgctaattaggcccctttcacctgtgttaaatgatttttaaataatttgaaagataacgggaaagaataacagcagaattaatatgaaagtcagttggcaggttattttgaaagcatcaatcaaagtagttaattatgggactataaaaagggaaacaataaaacataaatgcttgtatacacaacacttatgtattatcattattatatgagagtcactacagtcactggccaaaagaaactttggaaaaataatgtgtaattataaaaatcactttctcatataaattaaaatcaaaattattgttttacaatataaaaaaaagaatcgtcatttaaaaattcaaaatgggttactgggatggtgaaatgcacctgtcaccaacactgctggatgtagagtggaaggatagaatagactcttacaagtcatcctctgactttcacgcacatatatatactgtgatatatacggccacactcgtaaacacatacaactaaaaaactacaagcaatttagctaaaaataatgtatgtccttctgggaagcaataatgaacattcaggaaaaaagcttatggctacatatatagctaagtagtaacactttcctagaatgtataaggaccacactttaagagtcagtactgaaaaaaaaaggaagagtatccccttaaagtagacatgtcacagtattttcctgggatactttcaaaggttttatgagcccgacatcttttctttacaatgaaagtaagtgctcaggcactaagtcaatgtaaaatttgttgatatacaacatctcaattaaaaaaaataaaacctctttgtgtgaatggaaatatcacattttactgtcttatttatttctgaaaataaggagttctttccttttgttcatccattcaggaaacactgggcatcctaagtgtctaaacaaaacatgtaaagaaaataggacctttcccttatggaacctgtaaaatgaatgtccactgtcaaaaattccaaataacggttgaaaggcttgatcttttgagtactgaaatttatgtccactatgggtagcagaaacacaagctatacagttaaataaataaaattaaacaaggaaaactagtttgcatggttctatttggattcctagtgataaaatgcttcatcctgcttttgagtctatttagtgggactgtttccctagaaagtagaggtctgaaattatcagcactctaagtttcattgttttagacagcagtgaaacatattcaaagcttcagctaaatcattccttctttgtcttttagaaaatatttttaaggaaaataggacaagattccctgctatcgtgatgtgtacattctactcaagtgaaacataaggaatggcagatttgttaaatatacaataaaagaaagaaccataaaagggctaaaaggtggtggaacagaattagcctgtaggacatgttacagggtgagtggctttctgtttttgattgataagacaaaaccaagaacatcctgaaagaggcagtatcagagaaatagccaagaacaagcaggcaagcaagcaaggaagtatggataaacgcagctctctgttcttagctgtggatgtgatgtgactatcttctatttttttttttttgcaagaatttttttaaattaggtattttcctcgtttacattttcaatgctatcccaaaggtcctccatacccaccccccccaatcacctacccacccactccccctttttggccctggtgttcctctgtactggggcatataaagtttgcaagtccaatgggcctctctttgcagtgatggccaactaggccatcttttgatacatatgcagctaaagacaagagctcccgggtactggttagctcatattgttgttccacctatagggttgcagttccctttagctccttgggtaatttctctagctcctccattgggggccgtgtgacccatccaatagctgactgtgatcatccacttctttgtttgctaggccccggcatagtctcacaagagagagctatatctgggtcctttcagcaaaatcttgctagtgtatgcaatggtgtcagcatttggaagctgattatgggatggatccctgcatatggcaatcactagatggtccatcctttcgtcacagctccaaattttgtctctgtaactccttctatgggtgttttgttcccatttctaagaaagggtaaagtgtccacactttggtcttcgttcttcttgaatttcatgcgtttggcaagttgtatcttatatcttgggtatcctaagtttctgggctaatatccacttatcagtgagtacatattgtgcgagttcctttgtgattgggttacttcactcaggatgataccctccaggtccatccatttgcctaggaatttcatatatcttcttgaagctcttgctgctatgacttctctaacatgatgacctataatatggaattgctagctacaataaactccatctcccctaaattctaagaggacagacatgatgtggttatgaccaatctgctaagaagacctgatggatggaagtgagtaattcaagactgtttcagaaagagcaattttccatgtagaccaaacactggggcagaggcattgagaagggatgtgctgtaaagaggcaggaggtctatgtggctgcacaaagtgaagagggtacaacagacagagatcacagtggctcccagggaggctgcatgggtgaggtagtacatatagcccattgttgaagaataaaataggaaaggcttcacaggactgggagttgaagaataagattactggacctaattatgtgaaggatgattccacgttcttttttggaaagcaagtgagggaatgcatccggaaaaagctgtcatgaagccttgagacacagattcaaacaagagggcagtggtgacttttccagattggttttaaaagttaggtggattctctctatattttaaaggtagtcaataaaaatacatgacgtattttttaaaaaggaatctagaagacttgatttagaaatgtgtgcaaaatgtagtagtcttcaagctttgatatttctctgtatttttatttttttaagcattttgagaggctttgtttccgtatctgggaacttgggagatttctctttggctgtttgctttgttcacattcttttgacagctatctttttaactagcaccatatgatgaatactatatagtttataaaaatggggaagcatcacttttgttcctaggaatgataacaagagaaaataaaattagaaataatgatgcactatgaagaagtggatcaaaaattatggggagtcaaaaagagatgttcctttgggctggagaaaaagaaagctaccctgccacgccatcctgaataaatctttgaagacaatatggacttgggaattgaccggatgaaattcatccaaatttggcccatagaccaggtctaaaggacagttagtgctgtttagcagatggagtgattgaggaggaaaagtgaacaagttgttgcaggaaagatcagacgtgttgtgggggagctatttcatgggtgggactgctagaagttgccacatttcaaagaaacaccagtgcctttgcaaagagggtggttttgcaagagctgagatgggagtatggagagcaaggatctcttgattgaaacctttgcacctgcactgtacaagcaaagaggcagaaatataaagatcatctcttctggctcatagtgaacacatcctcattttctcaacagcaggggtaggggcctcattgcatccaatcttctttgaacataattgtgatttgtatgattgtagagagtcttgagagagaagcgaaaaggatgtagacttaaaggggagtcctttaataaggaaccaagatgtccagaaatttattaagttgcaaaagacttagagagatttacagaactttccaaagctcgtttgaggtaagagtcacaaatagccacctgctccagctctgctcagttcctcttctcagacagaatcgaaaagcaatctggcttctccaactggaaacatcttccggtattttccttaatgtagcagagaggcaggggaggtgaggagaaggtcactactttgaaggtccgtgaagcttaaaatgttctggctacagagtcagctgaaccaattttgttttccatggtgaaatctaaccaaacaaactcttgggaatgtacccagagagcttgtatccaacacttgaattttagaaggcaaaggaagaaaataaccgattgtttgagcaaagatccaattgtcagtaaggtgttccttcaccattctcttcagaggtggtagaaatgattagaaacaaatatgagtgtttggaggaggcatcccacacagacctccttccaccagaacatttttcagaagcctcaatagaaagtttgggtcatgtccttggaggtgaaacagcctggtcactaatgaacacgaatagcatttccttatgagccatatatttttcccagagggagatggataatcgactacaacatttcagtggattggaataagatttatctatctttccttatttgtcaagtttccttattccatttttgcaaatgaaagataaatgccttaatagattagcaatcatgaaatatataagtatttataaaacagtactgctttttaacaccatctgctgaagagcgatatttattcagccactgatatgagaacagattttcttctacattatgcagaagggaagtacacccttgtactaataagcatacactttggatttatccagcctaagttctaatgaaattttttagttgataagctgtgcaatgttgataacattacttaacattaactttcacctttgatggaatggtttcattataatcatacctttttaagtcatttagttcatatgacacagtaatatacggaaagcattctgccaaatgcctaacatatgtaagtattcgataaatactaactattatcatgcagcttcagagtattttgagtgtctggactgaattattttttaaaaggttgctcagagaaggtctctctgatttgcagcaaataggtctctggactaaactgaggcacacatcacaatcaggatggagcatacagtactttttaaagatgatgtagttcttgctcatgctgtacatgacatccattgtgagttcgcagagtatcaggttgctgaaggacttactgtcttatccactgctagtcaaacaggaaaggagagacccatacctacaataaatggtatatgttctgccctggagggagtgaagtaatctcctccattcacaattctctgcaacttgtagggcctggctcagctgaacaagggtcacgtgtaatgcagttatattcctgaaaggtagaagctggaaatccgtttaacagcactgatgacaatggtagagccattgacataactgaaaacaagactccaatggtagccttcttccacacagatacccacaagtacacatattttaaacttaaaatagtttaaaaattatggagttaaaattcattgcaatggaaatgatactaaggagctctggactgcaagtgatacatggatgacctccccaccttggtggtacataccacaagttgtcttgcgtttctgaaatgtctggccccacaagtggtgccatagtttgagttctttggttaaagatgtcccaagccatttttattctcttacagccttcttccatgattacatgctctttaaatggtcttatctatttttatctcatatctaatgggtttagtgtgttctaactgtatggtcccatttggcaagttggatgctatggataagaggcgccatataaaaaatattgttattgttataatgatgaactcaagcactgaaggggaagttgtgaaatctcttgatactaagctatcattatttttagcaaaatgaagtttggcttctttctacactagcaagccctaaagattaaatgtttgctatccacaacatggatcttagcaaagggccaaaaacatcaaaataaaaacattttgagataatgtttcatacattatatgacagctgtttgcttttaagtattcttggaaatttaatacaatataagaaattaaaaagaagaaatatagtaaacaaatctggacttatttggttttaattctagtttgattctcaccaccactgaggtcacatttgcctgttgtgtaaatgacttaaccctttgttctgctcagttgctatgttgtgtgaggtttgtgcaaggctgtgcttcagtgccttggggaatgcatcattaaggaaggaggtgcatgcagttctggaaaaagggactgttcaagtaagtccctttcctcaggatgatgtggtattatgttcccgttacttgaatattcattatggtttcccacatgtttttggctacctctgtttcctgcaactgtttgtattattaagttgatctggcttatagataagtggtttgaacttggataaatggtaacttgggatgctcacgtagattgggtagatctcctttcagcttaagagttatggatgttttctaaagggaggtgagacaaaacagccagggttttgttactaaagggcctcaaaccacagatggaaaactctacatggctagtctgaggaattctctagtgtgccaggcactggctgtccatgtgccttaaaccagacagatttccagagagcataactaaagcttcatttctttggaagtgagtaaaaagaagggcattggaacacattgccttgcagaaataggagaaactgttatgtattgatggtgttgtgattctatggctttctacatggaaagcattagcaattaacaagttaatttgggtggacaagaaatcaatgaatgcagatatcataagactctgatctagggaaagaaataagatagactgacggaatgatgaagcctaaagatttccttgccaagttctgatttgggaaccctgaattcagttcattgtccaagtgaaatattttttccttcttttgtgctgcccttatgcaaaaagatgtggctgagtggcaaagaactgggcttcagaaacaagaccatctggagctctgttccttactatgtctgcaaccctgagcaggtgacttcctctgtgggtctcatcccccctccctccatttactaactggaggagataagagtgacttctgggtattctgtacttttttttttttttttggctaatatctacttattagtaagtacataccatgcatgtacttttgagtctaagttaccttactcaggatgatattttctagttccatccatttgcatgcaaatctcaggatatccacattcttagtagctgaatagtattccatgtgtaaatgaacatagaactcaaaaaggtcaacaagctgaagtgcccaagtgaggacacttgactaagtcccacccgggagggagaagaaagcaatcacaagtggggagggagggagggatctgggagggaaagtgggtgagtgggtagtgcctgggagagcttgatttggtattgggtgatggaaaaggactgaagtcctgagggtcagcagaaagaatggaaataggcaacctcaggaggtaggaggttggggggaccctcagaatacaccagagatctgggaggtgagagactctcaggactcaaagggagagaccttagatgaactgctagaccgtagggagagggaactcaaagagcccacctccagcagaaagacagggcatcaaaggagggaggggggctatccaactctgacccataattgttcctgtctgaaagaattacagggatggaaatggagaggagcctgaggaaaagaaggtccagtgacagtcccaaagtgggatccagctcaaggggaggttccaaggtctgacactattactgaggctatggagtgcttacaaaaagggacctatcatgaccacactccagaagacccaacaagcagctgaaagagtcagatgcagatatttgcacccaatcaatggacagaagctgctgacccctgttgttgaattagggaaaagctgaaagaagctgaggagaagggtgaccctgtaggaggaccagcagtgtcaattaacctgaacctctgagatctctcaaacactgggccaccaaccaggcagcgtacaccagctgatatgaggctcccatatcagttcattcagagatgatgcacctaaccctcaagagattggaggccccagggagtttagaggtcatgtggagttgggggtggggacatcacatagagacaggggttggggagggggtatgggatatgaaacagtctcagggtggatggacagggattgggggggataatatatggagtgtaaaaaagtaaataagtaaataatttttttttaaaaaattgagttctggctttgttcttaggaccaagaatgtatctaatacacaccaagtatttgttaaagaagtaaaagaagtggcatgtttccaaaggattctactttaaaaggaagaaagtatagcatgtatttccactatgtgctccattgtgattgcctttagtagcacataaaaaacataaaacatctcatttaatttacctctaatagaagagaactgagttgctttctttgtatttttttgtgaggacaagagtcaataattctttccaaagtaaaactgccctgggttctcataaagtgagtagagatttaggtgctaatgatgaagaccagggactggagagacatcttagcagtgaagagcacttgctatttctgcagaggacctggttcaggttcccagcttcccagtacccatatggctatgaacagccatcggcaaatgcagttcgagaggagccattgccctcttccgtgctccgcaggcactgcatgcacatggaacacagacatacatgcaggcaaacccccataaatataaatttaaaaattatgtcattaaagacaaagaacagaagccttttacagatggttaaacttacctacatgttcctcaacaaatgaatggatcatgaaagtgtgaaacatatacaatggaagtttattcggctattaagaaatatgaaatttgtaagatatggatggaactgaaaattagcatattcagtgaagtaacctagactcagaaagacaaatatgtcattattctctctcatatgcatatctaagcttattttatatttatgtataggaatttgtgtagtcattgatcacaaaattgtatttggggtccaaatgacatgaagaataggctttaagagagggggttgaagctgaacatggtggcacatgcctttaaccccagcactcagaaggcagaagaagttgaatctgcactcaaggccaacctggtctacactgtgagttccaggacagccatggctacacagagaaatcccgtctcaaaaaggggggggggggggcagaggtagatgagggttgtattaatgcatacggtatatgcgacgggaaaggggaatattagggttgtatagtaaattgggaagggggcagggagacaagtggggtagagagagaagattattcaaaatgaagtatgcataaaacttcataagaaaaacttaatatactactttcaaaaaatcaaaaatagctttgacagtagagaagaagctacatatacaatgtaggtttctttgctttgttttgtttttgtttgtttgtttgtttgtttacatttttaaaatggaaaataattatatttacggtttaaatgtgtccatgtcctctcctcccgtgtactgcctcactttgttccctcaaaaccaatggcctctttatgtttagtaatgtatatgcacatacaaactgctgagttctcttcacatttcttgatgtctatgtttttactggtttgggataactagttaaggggttcattgctgggcaagattaagtcgtcttccctcagcagtcactaattgctgtaactctttgtctatgggtaggatccttgtgctttctcccttccacatcaggaagtctattaatgttatcgttcagatctcgtttaagcagatgtattgttgaggtttcaagggtgtagcttccctgtcacttttaggagatacagtcttgctgcagacttcctagtttgcaggctcttacatgctttctgccacttcttttgttatgttccccaagccttacataggcattctgttgtcagtgtatcatttggggctgggcaactgcacaatcaattgttctctgcattttgacccattgtggaaagtatagcatcagagattgaataaatacaattgcttatgctgctttggaatgatgacatgttaattataagtaacttctgtgtatactggccaactcattcctgaatttgagattttgaaagctaaagatgtaatgactaaggcttggttgtctcaaaggtatgcaaacttggtatatctaaaagaatctatgacttctttttatttgtataaatgtacccatgtattcatttcatctccccatctggaaagtgcctataacaattgttctttttaaatgcacaggattccccttcaattcttttcctttaattgtgtgtattggttactttcctattgctgtgatcaaataccatgaccaagactaggtatagaaaaagagtttacttcgaattatgattcctgagagttagaatccatgatggtagaataaaggcttgccattagaagtaggaagctgagggcttacatcttcctctctgagcatccagcagagagagaaaactagaattggcataggctttaaactcccataacctagcccaatgacatgttgtctccagcatggccacatctcctaaacgtacccaaacaacaccatcaactgacattcaagtatttaagtgtctgagagtatgagggatatctcattcaaatcactgcattctgctccatggtctctataatcgtgtgtgnnnnnnnnnnnnnnnnnnnnacacacatgcgcacatgcctatacatgcatgagagtgcttgcagactatatataataatgcaaattacttttagttcaacttcaaaaatctctatagtctttcacaaccacactttttagaagccctatgatcactatgtcttctaaaacttcaggcaatgtcttaatttagccccctgtaaaatctaacggcaaattatatacttcaaacacataatgatataagatatgtattgtattccaaaagggaggaatgggagcataatgaagaaatctttgacaaaacaagactgaattccagcaggacaaacatcaagacccatagcttatcatatcatgtcaacggctttgctgcccgcaatatgtaatacccacttgggctggttcttctccctaaaggcagctcttcttgatagatatatctcagctctgtcatggccaacatcttggacactacaatgcaacccagagtttactttcacagctttatgcaatggactctcgggacctcttgccctctcagagtttttattcagggacttctgcaatacacactcctctgcttgggcaacattaccaccaacttttgattgtagttactttccaggagcagaaatgccttaccatttctttcacaagtcagaaggtagttgaatgggcccatgctctgagggtaccattccctttattctagtgtaaataagcaatcaaatcaatattaggctctcttgaaattgccttcaccaaaaatactttaaactttattctcagaccatttcttaggacatagtctgaaagcagccagggttttgttgttgttgttgttgtttatttgtttgccaaaataaataagaacagtctataggctagctattaatagtctttctctaaaataaaataaaataaaataaaataaaataaaataaaataaaaactgcttgagctgggcctccacagttcatatagctcttagcattcctgtcttctaaactcctactaggatggcctattcggccccacttacatccttaaatcacccctctagaccaaagttacaaactcttccacattgttcctaaataaataaataaataaataaatagcattgtcagttccattccagcagtggccctctctctgcttctaacttcagtgttagtcacttttctattgtaataaaacaccaggaccctggcaacttacagaaagatgagttcattgagtttagtgttctagagggttagactaatccaggattgtgtaacaaagacatagcagtaagagcagaaagctgagggctcacagcttgacccacaaactagaaatggcatggtttttaactctcaaagtctgccctagggacatcaatttggcctatgataactgttaaaaagaacagttattaatttttcacctcattgcccactatagtattattatagtcttattctcttgtaaggttggtttataattattttatgatttttatcagactatagcaatttggttattcttttatgatgtgtcaaattataatccctccatgacagcagggccaagtatacattttagagttatacataatgaaacaatctagatcaaatattaacagagagatagagataaataagcagaagtataagtatgatgaattaatggatatattcattaatataagaataatatttattcaagcatatctaattactagctgtaagtaggtaaataatcatttatgagagaacatagactgtgaagtctaaagactggagatgtttttattactactattattattgttattattaaatttctatacagtaattttgattatactatttcccatcttcaacttctcccaggtcttccccaactcatgttctctctctctctctctctctctcaaaataaaactaaaaatataaatcaataaattaaacaaacaaaacaataaaattcaaactaacaacatgagcaccattttatattggccaactactcatgggcatggagtgcagttaatacagtcagtgtcactctgctgagaagacagtttccctttgccagcaggtaccaatcataacaacttcttgattagaagtcagactttgtgcctacttcctcttctctgtgctgggattttatctgttaagactagagtgaacagtccaacttaggttccatcccatgtggaggcaacagaccctgacactattactgatgtgcttacagaccggagctatcttggctatcttctgagaggctcactctaccagcacctgactgagacagatattacagccaatcattggaccagccctggtcctcctatgggagagttgggggaaggactaaaggagttcaaggggattaaaataccataggaagaacaatagtatcaactaacccagatccctcagagccccagagataagccaccaaccaaagagcatccatgggctggtctctggcccccggcacatacacaacagaggactgccttttctggtcacagtgggatatgatgtgcttaatgctgtagaaacttgatgtgccaaggaaggggtatgctggcatgggtgaggtaggggcagattagtgggtcagggagcactctctcagaagcaaaggggaggggtgatagggtgaagaactcagggagaggggattagtaagcggagcaacattttgaatctaaatagataaaataatttaataataataataataatagggtagggttcttatcctggatctgtcactagttataaaactgggtaacactataaaatcaatttaccctataaaaagcctcggttttcttacctgtaaactataggctacaatagtctctataaactgacataagaaatcagaagcacagtccaccggtcaaagaaaagagactcattcccatggctatttattcagtgggaaccatgggaagtgatgaatgcccactagcaagcacagctgttattgttaccacttctatcaaggatgcaggcaactaaccaaacaactcaatgtattagtttaaaatctgtgacattaggtgtacaaggcaccatatccagaggttaggccaagccccccggttgggggatagggccactcactcatctccaaattcttaactcagaagggctcctgtctaaaggaaatatgggaacaacttgtgaagcagagaatgaaggaacagccgtctaaagacttccccacctggggatccatcctatatacagacaccaaacctagacactattgcagatgcaaagaagtgcttgttgacaggagcctgatacagctgtctcttgagaggctctgccagagcctgacaaatacagaggcagatgcttgtagccaaccattggacttagcatggggtccccagtggaggagtcagagaaagaactgactggactggttaagaggataacatttgaaatgtaaacaaaatattaaaaaaaaaaaaaaggcaatggagctactcaaatggatggcatggcagcaagtacacatgtggtgttctctctgttaccctgagctggtgtaccctctctataccccaggaagaccctccaccatttttaatgctgtcttgtaatgtttcatgtgaaacatcaagatgtcactctttccttcattggctatgctggcttctctgctgactaattctgataacgtgcttgtgttcccctcagcacagcgttttgtgcagaagcgtctccccatccccattctcttacttctctctgggattcttgtctattttctatgaactcttagcttctttagtatatgtatactcttctctttaaatgcttagaaatatatttcaattacttttctaaacttctaatttgaaatataatactaaaaatcaaaagcattaaaattttcaattttatctattacatagcattctcttcttgatttgttttaagctatctctgattgtttcaattttttgtttttgttttcggatctatgtagtcttcatatttctggtgatctttgactgactgactgatcaataacaaatgaaggtccagacgtatagcattggcctttcttctttgtgtggcatttttcactcttattgaatctaacttgaacaataatttttgagtcagggaagtttatctgtaagtatttaaatttaaggacagttggaaacagctaagaccatgaaaatctttaaatcgagtactgagttggatttcactacaggaccaacatacacatgatggcttctagtgttccttgagaatcctttttgaactttttaaaaaaataactggttgatattttgtttgtagtcaaatactggcagcctctactattacaacaattgcacaagcagatctgaatgaggtcagctatttgacaaagagacatccaaccctctgctttccgtcctgtttctagtcccagactgtctctctcataaccactgattttaagatcaaagcctcttgcatagtcaagcagaataattgtcattcatcttttctcagtctctcaatatgcaatgtgtttgtgtcctcacttactgggcaggaacgagccctgacaaaaccctcctgtatgatgcattccaggaaaatatgagaagaaaaacaaactctgctgagctttagagaaaggaaaacttatcataaaataaaagtatcagttataatttatccttggtctatagaggaaggcatgtggtaggaaaatactgaatgtggcagtgttagaccatgtctggatgctgtctctgtcaaatggtatgcaaataagtattctcattaatataattctctaaaagacatttctgttgtattaatggatgttctgttaactatggatgctttggttgatttgttcttgtaaagttcacaaatcaagacgaggctacggaggaacaaggatgtagctcagtggtagagcacttgcctagcatggccagaaccctgggttcagttacaattctgagaaagggaaggagggaggaagaggaggaggaggaggaagagagagagagggagggagggatggagggaggnnnnnnnnnnnnnnnnnnnnnnnnnnagagagagagagagagactgagagagagagaggaaacaataaaaattaaaatgcaggatgtggctattctggttctgatcccattgactaccgtggttgatttggcagatctgattgcctagggtagatgtccaccttcttcctttatcatttcacgtgtgtccttctcaaagctgcatacacttttcagagaagatgaccttcctcaaaggatgaggaccattctcaagtcaaaggcacatggattgttgtgctttcttgctagagtcttcaaatacgttttcaagagatagatatgtgctgctttacaaattcttcctgggactactatttaatttgcaattttgaagcttaatcaggtgaaatataaaatattgtcagtatagaatgaggaaatgttgttgaaacacattcccagctttacatgtccagctttacaaaagaggagtgggaagcatcattattagggaaagtgagcacaaaacttagaacgagaccatttctgtggctacagcatatcctcatgccatcattagccatttggctcctgccaaacatttgcattctttattgcagttatgtgaagaatgagaacaattaaatcaattgtgattatttttgaaattattgttagaattcctctgtttacaacaactgagttctgtcaaatagctgacattaaatatcttcatcctcttaaactgcaataggcaagagagatgtagtggctttcataaacataacagccagcaagttttgtgtattattatgggttatggaattcttagtgtttttgtctgtcgtctcaattaaatccctacctctagtctgtgtggtaaacattattatattacagttgtgggatatgaagctccgagagggtaaataatttgtccaagatggttctgttaaaaagtataaatcccgaagtcccaaaacaagcctccttgaaaatgaagcttggtcatatagcctcttataccactaaagacggagggaaagagtctgagttggggtttaatatatgctgaactagattctagaaccattcagtagatgattaatgacagaaccctgggttaccttcagtttgggccatctttctggctttacaaacacacttcaagtttgcagtcattgtgttcttagacctatagtccccctgagtaaatgctctacccatgagggtgtcttgcataggaggggaagtttgtaaacacacagatatgcaatccatcacatgctgatggacagcctggaacttctctacacatttggatgagctatgtatgagctgcacaaacattgaagcctaagctcacaaccaaaaccttaagaaagtgccctcccctcccaactccaaaacaaacaaaataaaattatggtacatgggtaagggcataagtagcacagaaaatcttgaagtcctgtggaaacactccattacttgagtaattaagttcccagagtcagttattaacagtttttctcattccattccttggacaggtccagctgtgagatacagcaagttcaagatgtcagaggcaaagccacctcccctgctgggacagcatacaaggcatatcctgaaggaggtcctcagatatgatgagggggctattgagaagctactctgctctggtgtgatagagcaacatgaaaccaagtgacagaggagaatgcatcagaaaactgcagctggctggcccagacagtgagtgctctgtgcatgcctttcccagtcttgatcctactacaaagcatggtgaggagaactacagactacctgcctggcatctctggggtaactttaggattaaagtctagtgcccatttaaaaacttactgttttgacttttccccccagaaaataatttaatcattgatttatggaatttgattaattctataattttcatcctaaaggtataataactggtgttggaatgttgctttcatttaattcttccacaatgtataatgtatggaaacatcaaattataaattgtagttttgatttgtcaattgaaaataaagcaaaacctaaaaaaaattttttttctggaaaaagccctctttattctaattgtcttaatgcctaaaatgtttgcctgcccacccacacaagcctgaaaaaaaacagaacttttgacattttctacttgtacataaagttctcatttaaatcattgttaggaagtcagagcaataagcaggatgacagtctctgtgattgattttaaacagtataacttaatttcaagcccacgaaacctttgttagtctgtaatttaaaccattgactttgctgatggctgtagtaagactgagctctactctgcccataaggagtaaatatttgctttgttttgttgtcctggtgatactctgcggtgtggtggaatatcagtttctacctatttattcaggacatgagcatttgtgtatataaaaaactctagtggttcttctcttgctaccttattttgagacatagccacatgccatacactttagataaatgtgaggtgagtgctcacatgggaaagtgtaaagaacaccaaatggggaaatgataggaaatatttctttgtaacttgaagacgtagaagacagcatcatgtctttgtagtttgacttgacagtgagaaacccaagtgaccaaggagacaaaaagctgcctcaaagataaaaggaaataaggatatatattttagaataaactaccacaaatggctgcatagggcagggcatcaggtaccacttggccagtgtgctccactcatgcccataggcacacatactagaaagcaataccattatatgctggtagtaattgaaagctaaactgcaaacattcacctttcaagctgattcagaactagtcttctttttatgttggatggtttgaattacttacccatgttgtaaggcctgacagatatgtctctagagtcaaggatatgacataagaagtgtctctaggatacttttcagaggaacttatcctaatttttgagacctgccccaggcttggctttgctgttcatcatgttgtactctgacaaagtccattattactccagtagttagaattttctcataatagagtagtttgatgccttctgcaggtcctttgcctcagttccatatatatgtattgataacttattttatatataaatatatatatgtgtgtgtgtatatatgtatgtatatatatatatatatacatatatatatatatatatatatatatatatatatatatatatatatataattgttaacaccaagccagacttttataaagaatatatgaatgtattgcttgcatgtatgtatgcatatgatgtgtatacctaatgcctgcagaggtcagaagataacaattgatgcctgaaaactggaaaatgattgaaggctatcatgtggtttagaaactgaacttaggtcctctgcaacatcaataagtactcttaatctttaaaccattgttccagccccaaggcagacatttaaagaaaatgtctttataatcatatgactcatatggaaatcagaaagaggttgggtgacagaactgataaaataacatcttttaaaagccagatgcatcattttcccccactgaaacataaaatcttaaattgcaaatactccttattgagcaataattctacatatgtgaatacgcatatgtaggaggagtctgtcaagcacagggccagaacctcttaaactgtcaggttaattaaaacttaagtcttcaaatatggtagggccaccactgcagcatgactgtgtttccagattcccacctgcacagctcagaatgatccaggagaactttggatttctggtcactcacccaacataaaacattattccactgagttaaaaaaaaaaaaaagtaataatcaggctgtgcttcaagttcacactgattatcagttctgaaagaaacattgtgcttactaaaatttttagcaatatgccccagatcaaattatgcttataaacaaatgtgctgttttaattatcagagctggttatcttacacggtccccaaaataacacactactaagacaccatatgctcaggtccagtctgtgtcaaggcctgccttctggaaggttatatctgtggttggcctcagaaactccttgaaacctcgtgagttaattgttacgaaattgaaagcaagtccataagcaaatgaacttattttttcctgaaagtttttctaccataattttcttgttaaacaacatgatttttttttttctggtaaatagcctgaactgctgaatgttcttttagtagaaatgaaaacgaacatgatgaattttgtatgaatactgtaattatttctttatgcagtcttgtgttcatgaaacagctaagggtattagaaataaaatcacaatagaaggacatgaaggaggtattatatttgctgtttgatattgtgactttagaccactactctcagatattgctctgtggaagtcctttaatgtgaagatctcacaagttctatttttaaatctttttccaaaaatttgtacccattcatatattacttcaatttgacattacacttttgacttgtgtcttacctttggcaagttgcctattttaaaatctgtgtaggctgagagtgtaggttggtggtgaaacactattatagtttatgtgagggcccaggcttaattatgcaaaaacaaacccttaaaagctacatagatgcaagtcttgctgatcttctgcttatttgccttggagctgccctcatcttcaggaccactcctctaagcatctgccctgcggaatctgagaaggtaatgacagggctcatgaaagtgttaacacctttagcatcttggagctgcagacccttgatgctcagtaggtaaggaggtagttggggaaaatattctctacactccattcccctattttgcctactaatttttctaattattcctcatgatattctcctgtttttaattcatgaatgatacactatctgctgctacagtcaagttctgattggtgggcgttagactattctgtccagtactagccttggccttggtgtgttcctgctctttagcttcaggtcaccagtaagcactttaggcaaatggcctccaaagcatggatgttttgctctctacctggccttactgtctgtcaaacaggatgaagggatcctcacaatcttttaataagatataaagcattcccacccctcacagccctgccctacttccctgccttttcctttgcaagccaagaccatgatggtgacggtctgttcattcctatggctcctcaccacaccacggccctcagcagcaatgggcttactcagtagtgataaattcaacctcaacgcgtgcaccagagaggttgagaagagggaaagtataattgcctcaaatgaaggttatttttacctctttacctcctgtgaaccctaaagagagaaattcgatttctgaagcgttaggagaaatttggcaacatttgtagcacattcatcccaacagtcttggatatacgttcttaaactttaagaagaaattcctgactgtacaagttagatgtttcattctatgaatggtggatagacattgtgcttcttccatgagaaggttgagagaattgataccttctctttgagggagacttttaactactttttatgtaatagaagagagagcgctctggtccttgtctgaactgaggtgccctaagctgagggtgtttacagtgacactggtctcaaattctctaacccacaagcctaactctggaaagagcacatgctactctgagagccttctcagcctgctttgctgtgatggaaaactgagtcaaaagtaaactcaaatgacctgttcttaagatcacagcagaactggaaatacccagtaacttgagtttccagcctagagcccacatttttctctctctctcaaatcccaaacgttgcgcatgattctccagctttactttctggagaatccagagcccagaaagtgggcccagtgctgggagagcttacaccttgggaggcaaaccagttagttgaacttgacaaaccactgtaaggtcacagtgatcaatccaagtgttttatgcaactactctcataatgcttggttgatgcaaggtaaaatgagtaccttggtggatctgtgtgggtacattctgggggaaggtttatgaacttggcaagaagagcttgcagatctagaataggcctctgtaggggaggtagaggactctgacagtagtcagagctgtaccttcaatttcccacaaaaactggatgacgatttctaagacttatctacataaatatttaaaattacagtatcttaaatacatatgtgacttacctgtcagaacacataatagttaaaattcagtaactttggaaggttggtgaggtcaatgactgatattaaatttgaagctacacaatcttgataactggatctattatgttcttacaggcaatgtactgatctatgtacattctatgtaagtaagacaattaaaattcatagacgtggattacacatagtaacttctgtgtgagaaatgtctgggaaagcctggagggcattatccatgaagagaaaatcctaccatttcgtgagcactcatgtgtgctgtgctatggcacactcagtgatactaggtggccctctgccattcttaactacaagtatcacttaagctcttgggctctgccccttttgatgtccttgaagatgtaatgggaaagtcacatcacggaagcatgcaaggccctaacacagtcactatggcttttgcaaatgttctaaaataaaaggattcccaagtaagtagatttctgtgatgtatccttccatgctctcctcagcaagcactgccctctaaagagtaggaggcataattttaaaatcctatcaccctgaacaaaagaaaaaaatatgcgagatgcctgcagtgatttgtgagtccaatatgagtgaaattctctatcatcagaaaagcaggcatttgtacaaaaataatctatcatcaaattaactgcaaaagtccagtctttctgatgttggtttgcttatgacattttcagaatgttagaacttagggtaaagcaggtgcattcttcctggaaaagcgtaaaggaaaattttgtgagtttctcaattgtcctatcaacttttgtttactctctcagtctcttctatttaccttatgggtccactttttattatacagtgaggtaaaataaccgggagactagttggtcttgtcttaccactgtactatctttatgtgtgtcttagtcatcataatttcttcagtggttactactaatagtgtctactttacaggagatgagaaatatctgtttgatagccactctttcaccaagaagactgcaatccctaaggggaagcagattataacctagatatagagaggaaacattccatcactgtaaggaaaccaaggtggcaggaacttgaagtatctagtcacttctaacagccaagaacagagagagaataaatgaacacgtacttatcactcagctcactttccaagaattcagaatccaaaccccaggaatggtaccacctacttccagcccaggtatttccacatctattaagaaaagcaagcctatcacctccatagacaagctcacaggccaacctgacctagacagttcctcactgaaactccaggtcattctagattgtttcgaggtgacagtttaatttattcttttaaagttttatttaatgtgtttaggtgttttgcctgtaaatacagcatgtatgtccggtactcccagagatcagatgatatataaaaacattttaaagcaattttacaatagtataaattacaagtataatgcaaagcataccatttttgtgtgctacttattatttccaaaaatacaaatatactctctctgtggggaaaccctgctactttaggttgaagtctaccacgtccagatcactcctctgaactaagcacaaaatggaggactccctttttgcagcagggctttcccttctctcacttttgtctggggagcctgatcccacaacctttacctgaggaaggtcatgtagcccttgggaaacctacaagtttaacttcctctttaccaacaataatcttcccactggggctggagagatggctcagtggttaagagcatcaatttttcttccagaggttctgtgttcatttcccagcaatgccatatggctcacagccatctgtaatggaatctgatgccctcttctgatgtgtctgaagacagctacagtctattcatatatataaaatatatgtcttaaaataaaagaatctgcccagcaaataccttggatttctggaatgcctcttcatacaaatgagacattcacagtacttaaaactccagccaataattttacattcaccctgaatatttttcccactcttcaaggttcatatatagcccttggtcaccctgaataaagtatatgcacaccagctgtttcaccgaatatcttttaaaggaggtgcacccctaaaattctcagagaaggtcttctttggagaagatcccacttcaagcactcattcccatccagacttggattgtgcagtgcaaatgaagtttaaattaatgcactattaacaaagttatcaatattgttcaaatgtcatcaattgcctctctttggtggtagaattctaagagattccctgagattaccagcccctttgaacatgcatacacttctcagtcaagcagtaggacattaatttaactgctgggtaaatgttgaagataaaattaatccaaaacaaaaaaacaacacaataaaaaaaagaaaacattgagccaggtgtgttataattctagaaattaggtggctaagagaggagggttgtggctagcctgggctatataatggaaatttgtctcaaaaggaaattagtgaaatgaaatgatatcagttgatcctagcataaagaggtcagctgagtaaccctgatatcacaggaacagaatagggggtgttgatatgacatgtaaggaggctccattgctggagggaataacatagtaagtaattgaagtgtcctctgggaagtaagagaggtctccaagtgacagcactatggtacttttcttccttccttccttccttccttccttcctctctctctctctctctctctctctctctctcccttcctttcttcctttccttccttctttctttctttctttctttctttctttctttctttctttcgttctttctttcctttttattttttgtatttgctttgtgtgtatatatgtctctcttttgtttttttaaatttcttttttagggagtgagagtgtgagagagagaaataacatgaagttggacgggtatatatttgggagtatgtgggagtttaaagagggggaagaatgtaatcaaaatatatcatatagaacatattttaaataaaaattaaataagaaaataggaaactatgtgcattctaccaggaatcttagtttggaagtggatttttttttccagaaatgccacacaagacctcaaggaaaccaatactttgacttgcatcatgtgatattctgactaaagagtccactgacattcagccttcagaaagtggttaatcagtgtgtatatatggggctgggataatggctctgtcagtaacatgattgaggtcctgagcatgtccttagaacccatgttttgttgttgttcttattttgtttagatattatcatagcacagttataatcactgcactggaaaggcagagaggtggttcccaccagcttagcctactagacatttttcctggtcagtgagagctcttgtgcaaaaataggtgggctacatctgaagaaaaatacctgttgttgtcatgtaacctgaacatgcacacatgtacatcaataagcatacatagatactaaataaataaattaaataaatgagagtattgcttttgcctctaaactaagcaaaatttgatagcagtatatatttattttaattacacacagagatagatagatataggtataatcctttttccagtttagaacctgggttagtttcccaatctttctttgatttataaattttgacattttgaaagacactgtgcaattatttaattgacattattttggtaagtgctgctatcactatgagagcttacctgttttttggctcataatttgagagatgatttcctgttttcttagtgtatcctagcaagaagtgtgtgatgttccagcatatttaattaccaatgatcttaacgttgatcatttgtttaggactctgtcttccaagatccacctttctttcatgtatagtttgtattttgtaattaatactatattatcagaagatattttcagaatatattaattcctttagacacaaccacaaccttacaaatatgtatgaatatacatatatgcatgtaataattactgaaaaacaaagctatgagtttaatggagaaaggggaggactatgctgaagggttaggagggtggaaagggaagggaaagctttataattgtattataatttcaaaaacataattaaaaatggttaatatttaaaaccaaaccaaagccaaaacaaaaccttaaaacatagagcttcattcccttgctgttctagagacaagaagcccaagtttttggcaattaattgaaatcaacagtgctatgtcccctgtgaaggcttctgggtgaagccctgacacacacttcccagcttctcctatggcactgttatccatccttttgctcaaggctctctctgtagtacaaagtagttctctgactctgctttctccctgttctactcacgaactatcacatctccccttgcctcccaacaggactctgtagaatcatttcaggcccacttatgttcagaagactctcatctccaaccaactacagctccaactagaataaatccataagtactcaaggagctaaaggggtctgcaaccctataggtggaacaacaatatgagctaaccagtacccccagagctcatgtctctagctacatatgtagcagaagatggcctagtcggccatctctgggaagagagacccctggtattacaaactttatatgccccagtacaggggaatgccagggccaagaagtgggagtaggtgggtaggggagtggggggagagggtatgggggacttttgggatagcatttgaaatgtaaatgaagaaaatacctaattaaatatatatatataaaataataaaatgcatttccctcaaaaaaaaaaagatagcatttatgtgtcacagagtgacacataatgtcaaatattgtgtttttcattatactttgcacaagctttgtatctgcccatgatcacccgtggagtatttcctctattaatttcctgcttattcaagtgaattctgctgtgactcagcattgtctattaaatttcaattacttatatcagttgggaacactggatactttgtatataggtagttatccaccacaggtgaaacaggtcaaacagatcagaactggtttgtttgctacctggagaaaattgtagcttagaaagagccccgtgtgacaagtagtttctattaggcaacctcaaccgtgtttactatgagcctcacctcccctacttcaatcatctccactcatcccatttgtgaagacgtgaaaaagaggctctatgttatcccctttggcggatctcagggcaaaatttacagtagtaaaagcagagctcgaaggtagagagtatgtagcacaatcgcttttgtgaagttcttggaaggctctctcagaatagcctccacttttattttatacttttggcaagtggttctgtagagggaatggtgcaaatttttcccttctgggacgtttgatgacatctgcagtcattattttttatt

SEQ ID NO: 1567 - DNA, 1749 bp, Mus musculus
gggctgagggggcctaaggtcaaggagggaggtcgcggggcgctctcgctggggttgaggggcgatgctgtggatgctggccagggcggtggcttttcggagacccggccgaggcctggccggcgggagggggctgtggaccggccgcccgcagtcagattgtgacagtatgaagcccctggagggtgtgagaattctggatctaacaagagtactggcaggaccctttgccacgatgaatttaggagatcttggagcagaagttataaaagttgaaagaccaggagctggtgatgacacacgatcttggggacctccttttgtgaacactgaaagtacatattttcttagtgttaatcgaaataaaaaaagtatagctgttaatatcaaggatccaagaggagtgagaatcgtcaaagagcttgcagccatttgtgatgtgtttgtggaaaactatgttcctgggaaactttctgagatgggcctaggatatgaagatatagataagattgctcctcacatcatctactgctccatcacaggatatggccagacagggcccatgtctcacagagcaggttatgatgctattgcttctgctatgtctggtctaatgcacatcacaggacctgaggatggagatcctgttcgccctggagtggccatgactgacctcgccactggtctttttgcttatggggccattatggctggcctcctacaacgttatagaactggaaaaggactgttcattgattgtaatctgctgtcatcacaggtggcatgtttgacccaagtagctgctaattatcttattggacaaaaggaagcgaaacgctggggcacagctcatggcagtattgttccttatcaggcttttaaaaccaaggatggctatcttgtaattggagcaggaaataaccaacagtttgctgtggtatgcaagatcttgaatttgcctgaactgatcgatgattgcaagtatagaacgaaccatcttcgggtacagaatagaaaagagcttgtgaaaatcctttcagcacggtttgcagaagaagtgactgccaagtggctttgtctctttgaaggaagtgggatcccatatggaccaatcaacagcctgaaggatgtgttttcagaagcccaggtactgcacaatggccttgttatggagatgaatcatccaactgtggggaagatttcagtcccaggtccagctgtgagatacagcaagttcaagatgtcagaggcaaagccacctcccctgctgggacagcatacaaggcatatcctgaaggaggtcctcagatatgatgagggggctattgagaagctactctgctctggtgtgatagagcaacatgaaaccaagtgacagaggagaatgcatcagaaaactgcagctggctggcccagacagtgagtgctctgtgcatgcctttcccagtcttgatcctactacaaagcatggtgaggagaactacagactacctgcctggcatctctggggtaactttaggattaaagtctagtgcccatttaaaaacttactgttttgacttttccccccagaaaataatttaatcattgatttatggaatttgattaattctataattttcatcctaaaggtataataactggtgttggaatgttgctttcatttaattcttccacaatgtataatgtatggaaacatcaaattataaattgtagttttgatttgtcaattgaaaataaagcaaaacc

SEQ ID NO: 1568 - protein, 436 aa, Mus musculus
MLWMLARAVAFRRPGRGLAGGRGLWTGRPQSDCDSMKPLEGVRILDLTRVLAGPFATMNLGDLGAEVIKVERPGAGDDTRSWGPPFVNTESTYFLSVNRNKKSIAVNIKDPRGVRIVKELAAICDVFVENYVPGKLSEMGLGYEDIDKIAPHIIYCSITGYGQTGPMSHRAGYDAIASAMSGLMHITGPEDGDPVRPGVAMTDLATGLFAYGAIMAGLLQRYRTGKGLFIDCNLLSSQVACLTQVAANYLIGQKEAKRWGTAHGSIVPYQAFKTKDGYLVIGAGNNQQFAVVCKILNLPELIDDCKYRTNHLRVQNRKELVKILSARFAEEVTAKWLCLFEGSGIPYGPINSLKDVFSEAQVLHNGLVMEMNHPTVGKISVPGPAVRYSKFKMSEAKPPPLLGQHTRHILKEVLRYDEGAIEKLLCSGVIEQHETK

SEQ ID NO: 1569 - DNA, 1330 bp, Mus musculus
gggctgagggggcctaaggtcaaggagggaggtcgcggggcgctctcgctggggttgaggggcgatgctgtggatgctggccagggcggtggcttttcggagacccggccgaggcctggccggcgggagggggctgtggaccggccgcccgcagtcagattgtgacagtatgaagcccctggagggtgtgagaattctggatctaacaagagtactggcaggaccctttgccacgatgaatttaggagatcttggagcagaagttataaaagttgaaagaccaggagctggtgatgacacacgatcttggggacctccttttgtgaacactgaaagtacatattttcttagtgttaatcgaaataaaaaaagtatagctgttaatatcaaggatccaagaggagtgagaatcgtcaaagagcttgcagccatttgtgatgtgtttgtggaaaactatgttcctgggaaactttctgagatgggcctaggatatgaagatatagataagattgctcctcacatcatctactgctccatcacaggatatggccagacagggcccatgtctcacagagcaggttatgatgctattgcttctgctatgtctggtctaatgcacatcacaggacctgaggatggagatcctgttcgccctggagtggccatgactgacctcgccactggtctttttgcttatggggccattatggctggcctcctacaacgttatagaactggaaaaggactgttcattgattgtaatctgctgtcatcacaggtggcatgtttgacccaagtagctgctaattatcttattggacaaaaggaagcgaaacgctggggcacagctcatggcacatacaaggcatatcctgaaggaggtcctcagatatgatgagggggctattgagaagctactctgctctggtgtgatagagcaacatgaaaccaagtgacagaggagaatgcatcagaaaactgcagctggctggcccagacagtgagtgctctgtgcatgcctttcccagtcttgatcctactacaaagcatggtgaggagaactacagactacctgcctggcatctctggggtaactttaggattaaagtctagtgcccatttaaaaacttactgttttgacttttccccccagaaaataatttaatcattgatttatggaatttgattaattctataattttcatcctaaaggtataataactggtgttggaatgttgctttcatttaattcttccacaatgtataatgtatggaaacatcaaattataaattgtagttttgatttgtcaattgaaaataaagcaaaacc

SEQ ID NO: 1570 - protein, 276 aa, Mus musculus
MLWMLARAVAFRRPGRGLAGGRGLWTGRPQSDCDSMKPLEGVRILDLTRVLAGPFATMNLGDLGAEVIKVERPGAGDDTRSWGPPFVNTESTYFLSVNRNKKSIAVNIKDPRGVRIVKELAAICDVFVENYVPGKLSEMGLGYEDIDKIAPHIIYCSITGYGQTGPMSHRAGYDAIASAMSGLMHITGPEDGDPVRPGVAMTDLATGLFAYGAIMAGLLQRYRTGKGLFIDCNLLSSQVACLTQVAANYLIGQKEAKRWGTAHGTYKAYPEGGPQI

SEQ ID NO: 1571 - DNA, 748342 bp, Homo sapiens
  misc_feature (1)...(748342): n = A,T,C or G
cagcctgggcaacagagtgagactttgtctcaaattttctttaaaaaaagctttttttggccaggcgcggtggctcacgcctgtaatcccagggctttgggaggctgaggcgggcggatcacgaggtcaggagatcgagaccatcctggctaacacagtgaaaccccctctctactaaaaatacaaaaaaattagccgggtgtggtggcaggcgcctgtagtcccagctactagggaggctgaggcaggagaatggcgtgaacccgggaggtggagcttgcagtgagtcaagaacgtgccactgcactccagcctgggcgacagagcaagactccatctcaaaaaataaaaataaaaaaaaataaaacataaaaataaaaaaaagctttttcatcatctattcatacgataatgagatttttcttttttcgtctattgatgtgatggattactttgatttttggatgctaagccttaaatatctagaataaataccacttggtcatggtatataattatttttatcttactttatttttgagacagagccttgctctgtccccagggtggagtgcagtggcgtgaacactgctcattgcagccttgacctcctgggctcaagctatccttctgcctcagcctcccatgtggtcctatccagctgggaccacaggcgtggaccaccatgcctagttaatttttcgatttttttggtagagacaaggtctcaccttgttgcccaggctggtctccatctcctgggctcaactgattctcctaccttggcttcccaaagtgctgggattatagctgtgagccactgtacctggccaatataattctttttatttattgctggattctatttggtaacactttattgaaaacttttgcatctatggtcatgagatattcgtaagtatttttcctttcttgtaatgtttttgtctgactttggtattagggtgatgctgccatcacagtatgagttaggaggtcagagtagattttttattataaaatatttcaaagaagagaaagtaaatatacgtgtattccatggtgaggtttaataaattttaacattttccaaatttggttgacttgaaatacatatccactcacacatccatgtccatctgaagcttgtatctccctgaacccaccccaaaataattactatatctaaagcatgttaccttcatttgtatttacactatgaccttatatttaccatttatagagagtacagcatattgttttgcagacttttaaatttgacgtaaagaatatcacataagttttgctttggcttttgtttgtacacaattttagatttattcatgttgtatcaaatggctctaatttaatcaactatcttgttatactgtgcaaatatgcaacttatttatcctttctcctatggtcatttagattgttggcaatctttcaactgtaaaaatttttttcttttttgagacaggatctccctgtgttgcccaggctggagtgcagtggtgagatcttggctcactgcaaccttcacttcctgggctcaagcaattctcctgcctcagcctcccaagtagctgggatacaggcacatgccaccatgtctaatttttgtatttttagtagagacggggtttcaccatgttgggcaggctggtctcgaactcctgacctcatgatctgcccgcctcggcctcccaaagtgctgggattacaggcgtgagccaccgcgcccagcctcaattatggtttttaatgaatttgaacaaatacaagtatctgagaagagttaaccctaattaaataaagccgattttcttttttttttttttattttgagacagagtctcgctctgtcgcccaggctggagtgcagtggcgccatcttaactcactgcaacctctgcctcccgggttcatgccattctcctgcctcagcctcccgactagctgggactacaggcgcccgccaccatgcctggctatttttttttttttatttttagtagagacggggtttcactgtgttagccaggatgggttaaagccaattttcaaatgtattgtcctacactaccttttggagacatttacttctatatacctacttatatctaagtatatgttctgcttttaagagtactataggccaggaacggtggcttaggcctgtaatctcagcactttgggaggccgaggtgggcagatcacgaggtcaggagttcgagaccagccttgccaatatggtgaaaccccatctctaccaaatataaaaaattagcagggtgtggtggtgcgtgcctgttgtcccagttacttgggaggctgaggcagaagaattgcttgaacccgggaggtggaggttgcagtgaggcgagatcacgccactgcactgcagcctgggcgacagggcaagactctgtctcaaaaaacaaacaaacaaacaaaaaacagtattgtatgtgagctgggtgtagtgtcacacacctgtaatcccagctacttgggaggctgaggcaggagttggagaccagcctgggcaacatagcaggatcggtctcaaaaaaaagaaaagtattgtatggtattttatcaaactaagacatgtatttaacatctctgaaattaagatgtatcttataatcaatgacatgtcacagcttaactggcagtatttttactaagtggcatataaaataatagtgaatctcaaagcatcttaaattagatgataaattatggaaattatgagcaaaataaaagaggtaattcaggctgggtgcactgcctcacccatgtaagcccagcactttgggaggctgaggtgggcggatcacctgaggtcagctgttcaaaaccagcctggccaacatggcgaaactccatctctactaaaaatataaaaattagccaggcatggtggcttgcacctgtaatcccatctactcaggaggctaaggcaggagaactgcttgaacccaggaggcggaggttgcagtgagccgagatcacaccactgcactccagcctgggcaacacagtaagactctgtcacacacacacaaaaaaagaggtcattaggaagttcagggcttatatcaggtgtactgatgactactatgtatttttttttttcagactagtcaagtgcagcagtgagaagcggggggaagacgagaacaaagagttcgatctgtaactgactgaacaatcaattaagataactcactaccttccaaccaggcgattatgtgtcttatttacagtaaaaactacaacatatttctgttaacttaaacctaagtatatggtaggaatgaatgatacagagaaatggttgagtgacaatagcaggagactttggcctatgtaaaacaattaatatggaatttatagaacctaataataaatgtactggcaagggttaatgaaaatgtttctcttaagaatctgaaaatgtttcagaaaatataaattcatgaacttacttctaaaatgtttttaacttgaagatgtaatgttagtatgtcagaagtaaacatgaaacttttaacttcctcctccttgatatcatgcaaactatgctactgagacaggaattgagatatcttcatcaggctctttataattatcaagaatggtggagggccgggcgcggtggctcacgcctgtaatcccagcactttgggaggctgaggctgggcagatcatgaggtcaggagattgagaccatcctggctaacagggtgaaaccctgcctctactaaaaatacaaaaaattagctgggtgtggtggcacatgcctgtagtcccaactactcgggaggctgaggcaggagaattgcttgaacttgggaggcagaggttgtagtgagctgagatcgtgccactgcactccagcatgggtgacagaacaagacttcgtctcaaaaaaaaaaaaaaaaaaaaaagaatggtggaaatacagagtttgcttcacaggagattcaccaaaactaatcatgcttttttactaatcttgaatattttaattcttaggtagatgaggcaaagagcctcaccatttgctttttgcctaaaaataaggtatcttttccttcatgttaaactcatgctctttgctttcctttcacacaatgtacccacaaaggaaatgattttttgaatagtccagaaacaaaaaggcaaggtcactgaacactttcatcattatttcccaacttgataatacatctgaattctgaacatctccacacgggccaatataacttatttttttttttttttgagatggagtatcactctgtcacccaggctggagtgcagtggcactatctcggctcactgcaacctctgcctcctgggttcaagtgattcttctgcctcagcctccccagtagctggtattacaggcgcgcgccaccatgcccagcttatttttgtgtttttagtggagacgaggctttaccatattggccaggctggtctcaaactccgaacctcaagtgatctgcccacctgggctcccaaagtgctgggattacaggtgtgagccatagtgcctggcctataactcatttttaacaccacactttacccacaatgaaaatagattaacttccatcatattctcttaattatggcagtcagaagttggctaaggggccaagcgtggtggctcacacctgtaattccagcactttgggaggccgaggctggaggaccccttaagcctaagagttagagaccagcctgggtaatacagggaggcccctataaggagaccctctaactctttgaaaaaaaaaaaaagtctgttaatgttcaaagggaagggacgtaactccacatcttgataagggtagtggcaaggttcgagaagggtatgagactttaaatattgttggggtcatttctgcaaaacacaacttgccataggtttcttttgtaaaatgggagaccagtgattaccaaaaggcagcagggaaaaagaactggcatgatcccttgatatggatatgtttttatgtaggtcaattttaataaaggatttacatgggcactgggatctgaatttgcattcccttaaagctatttatgcctgcatatcccttagaaagtttaatattcccaggagtatgtagacccttgtttgaagactctactatagactacacttccatcctttaagcatatgaatttttaagatgtatacttaattgtaagtttttctaaaaagttattcagcatttttatagaggtaaaatgtgtatcctagaacattaaaaaacaatccctttcattttaaagaataatcaattccttttactcagataaataaaaatagagtaacggtaacaaaccaaatggccaatgccacaagaattttgataactgaatacactacttacagtgtatgcatctttcctgaggacaaaaatttttcttaaaaaactcaggccaggtctctagaagtagatgttggtaagcgttagcaagaaattttacctttgttttatgttacacttacagtgaaataaaatgtacgtagaccattagaagagttacagtttgaatgtcttccaaatatgatataaatacactggcacaaaatcctaacttctgttttcgtctttactaataacccaatgatctaagagatgcttcagtaaattatctccaaatgtcatttcctaaagacaacatttcttacctataaagttcaataaagtatttaaaaaagtattccctttgctttaatttccattatacatcatgacctcaacatatctggaaagacataatgttgggaataaggactttttctttaaaatactggggaaaaattactaagttatcccttttatatacagggtgtaggtagaacaatatagtagttacaatcagaatttctacatccatttatcacttaagtacctactatcttgcagacactattctaaaaactaaggaaatgggggtaaatgagaaagtaacagctaccacttattgagtgcttactatgtgccaggctctggcttaagagtttcatacataaattcatttaatcctccaacacaacacctctatgacacaggtactattaattttctcatcttacacatgagaaaattgaggcatagagaagtgaactcatccagctagtaacttgtagaaacagcatttccaaaatcctggctttcatggagcttttattaatctaaaagccttccattcttattttctagtctctgtgaaatacctaatgaacaaatttctgtgggtatggttcaaataggaggtgtgaccattttgtttttacacgtttctttctgggaatgttgaaacaaaagttttactagctctatcttcgtattttgtaacttcaaaatgcctagagtctgtgttacatgttaaaacacctgattttggccgggcatggtggctcacgcctgtaaactcagcactgtgggaggctgagatgggtggatcatttgagatcatgagttcgagaccagcctggtcaacatggtgaaactaaaaatactaaaaatactaaaaatacatgttctgggctgggcacggtggctcatgcctgaaatcccagcactttgggaagccaaggtaggggatcacttgagaccaggagttcaatcgagaccagcctggccaacacggtgaaaccccatctctattcaaaatacaaaaatgagccaggcgcgtgcctgtattcccagctactcaggaggtcgaggcgggagactcgtatgaacctgggaggcggacgttgcagtgagccaagattgcgccactgcactccagcgtgggcaacagagtgagaccctatttcaaaaacaaaacaaaacaaacaaaaaaaacaaaacatggtctctactaaaaatacaaaaattagccaggcatggtgacatgtgcctgtagtcccagctactcaggagccgaaggttgcagtgagccaagattgcaccactgcactccagcttgggcaacagactccatctcaaaaaacaaacaaaaaaccacttgatttttaaaaaatagttggggtaacaattcttccatatttttctctccagaactataggtatatatccatagcatcccttaatttggaaaaccacttctctactccaggtaggcccagtggtgttcaaggtcacagaatcctgtctcattatggtgatgtgtccatgattcaagttaattaggtctcactgtggccttggccacagttaattggttcaataatacagaaacatgatctaagtatggcaaatttgtcttctcttggattgatggagatgagagatgttctttttgcaatggaagtgatttgaggctgctggtagctatcttctttggcctcaagagaaactaactccataatgctaagaggtatagagaaattcagatagaacactttgatttagcaatgcatggtctattcttgccttttccagttaaatgagtataaagttatgcttaaatgggtttctggggcttcaagttttaatgcattttaacagaagcattagataaaatgagtatgaacagaactctgttattctcatcctcattatttacgaacaaatacagagctgtctacagctcaaaggatggtttacctatttcattttcaaaaataatttgcaaaacatttacctatgaactctaagtgactacaaagcattactgtagtaagtctacttctttatcataccacaaaaccacaatagctagaagacaaaatgttttattttaaaacattgaaaaaacattaaaagacaaatgtccattatgtaaccaggaatgttaaatatatggaaacggtaaatctctaaaatgtggtaggtacttccagagctaaatgttgcaagttatcctacttttttctctaatatcaacaatacctgatacgatgaaaaataacaaaaagaccttactaattatccaatcaaagtcatcatctttgggtaaatttatatcaacacaacttaaagttttgtccaagatgttcctgacacatgaagcttccagttgaatttcagaaatgttaacaaaagtatcttccttttttgcctgtgaatgtttgagtattgctgtattgttggcttatatccactacagatactggttctaggccagcccaaggatcttcaagcattgaaggcttgaaataattttccaactcattagacattcttttttctctaacacgccctgatccaaatggtgtagatgtccttggagaaccctttagaaaaaaaatcagttaaaaaaacacttagtaaagataattggtacttcttcctttagctaaaggttagcgggaatcacattgctgcttaaaagttgtgacttgaacctaaataatgttcaattacaaagtccatgcttcctttaatcaagtgttcctattttttaaaaaaagtacttaaagcaattcgttattctcatttatttataattccatgaccactgtcatctcaaatacttttgtgtctaatgtagtaactttgcagtaattaaatacaagcagtgatgaaatcaagtaattatattcaattttccctcgaaattttcacttttttcaggagaaaacaatactatagttttaaagtttctagaacctttctagctcatgaacattttctttactccttagctccaggctcaaaaggggtagggggttggtgtagaatacagcaagttggaaaaccacgtagttgcaagttgtaaaccacagaaatcccagacatgctagagatactctctctgtcttttgtatttactctcactaaaggaatggaaaacttccactaccaccgattttcttttcagggaagttggagcagaagccagtgtagctcgaaagaaagataaaaaaaaaaaaaaaaaaaagaaaaagaactatttcttgaaacaaactggcaaggcctttggcaaacaggaggaaatggagaattaggaaaatctgtgtacgggtggcagtgtattggttaaaagcacgagggctcgaaaacagaacgtacggctctgccactctttcggataatcttccggaagtcactcaacttctctaagcctcagttcgctcatctgcaaaattgggctaacaatagtacctcagagaggattagacaaaataatccacgtaaagggaatattagtaccgtgcctgccataaagtaagagctcggcaaacgctggctattattattacctgggggtgggtctgctgctgccctggggagtagccgaattgctgctgggaccccgcgggggacctggagtaggagccagggtagccgccaggggacggagacccgaaccggccccccgggaagctgccgccgtgtcgcggagagtgactgctcccgtacggcctagaccggggcccgtacggcggcgtgtggtgcggactcccgtacccgtctcgaggggagggcggccgtggtccgcccccgcccggggttccccggaagctgcttccgctaccccaacctcctccacccggaccagggtaaggaggagttgggggccgaaaattctgtcgctgcatatcaggagccaaagccgaaaacctcgcagccgcgttctcccaccggaactgtatcaaccggccctccgcagagaactgctagtcctttaccaaaacagtcctccgaccgcagccaccctacggcacatcagttccggcgtcacaaaggttccgccaggggcggcgggattacctaaatcactgacttggcgagagactcagtggatttaagtgaaaagaggaagaaaaggagacaggaaaggacggacacccaagcccagcaacaacctttccagtctgagtgcccttggtctgaccgacagactagaagctggcccagcaggcgactagtgctcagccccgcccggcgggggcggggtctgcggcgtccgtgggcgccccccagtggcggcgggtggcgccgcacggagttcgccgcttgcaccgggaccgatgccatctgagacgcacgcgatgctggcgacgctggcgagggtggcagctctgcgcagaacctgcctcttctccggccggggcggcgggagggggctgtggactggccgcccgcagtcaggtaccctccgagattcggtctgggtggctaaagggatccctgccccagcttgcctcctcgggcgccctgaggagagcaattagggtctgaagtctctgctgaccccttagcggtggctttgctcgcctccctgcaaccccgttccgtgggcctgcggccggcctgccccgctctggccgcccagggtcgcctctgtcccgtgcgttgttgtgaccgagggctccgtgcgccgtggggtcccgctcctgcgcgtcccgcggctcgcgtttggggcctctttactcctgtcctttcgtccgccaagtttaagtaacttcgaaaatgcacaccaagccacatttcagaaaggactttagcccgctgctttgaataacttgacacttcatgtacaataaaagatgcccttgtacagttacctgttgcagaattttatttagaggatgaaatttagctttactacagtgttatagaactttctttactccctctgaatttgggaatggtaatccactatgaatcttttttttccttttttctttttttctcttttttttgagacggagtctcgctgtctcgcccaggctggactgcagtggcgcgatctcggctcactgcaacctcctcctcccgtgttcaggagattttcctgcttcagccttccgagtagctgggattataggcatgcgccaccacgcccaactaatttttgtatttttagtagagacggggtttcgccatattggccaggctggtctcgaattcctgacctcaagttatcctcccgcctcggcctcccaaagtgttgagattacagacgtaatctctatgattatgcgcgcggcccactatgaatcttgaaattagttgcaggatgcaggatttttttttttttttttgagacagtctcgctctgtcgcccaggctggagtgcagtggcgcgatcttggttcaccacaacctctgcctcgcgggttcaagcgattctcttgcctcagctttctagagtagccgagattacaggcatgtgccacatgcccggctaatttttttgtatttttagtaaagacgggtttcaccatgttggccaggctggtctcaaattcctgggctcaagtgatccgcctgcctctgcctcccgaagtgctgggatttcatgcgtgagccaccgcgcctggcgtaggatacagaatcttaaaagagctttaggactcattaaatcatagcctaacgggtagcctggacctgtgatttccattcaccctcttgtagctgctactcctcgctgtctctttgacatgttctgtgacatcccaagctgacgagtgtggtatcttctcagcttctatcctccttgatgaatggagacacacacagacagtttttttgtttgtttattctgtggaaattcaattcactacatttcgtttcttctgtagatacaagtgatagacttaatcaaggtagcacgttgccattaaggcttagtgatacaattaaggtcggaggactccagcctatccactttattaaatacagtagttctgtcctggccaaaaattcacctttctggacattgtctttagtgtttaacttaatgcttgggaattgctcatttgaatatttattgaataaaatgacctaggtgggacgattgcttgagcccaggagttgaagaccagcctgggcaacatcgtgaagccccatttctaccaaaaatacaaaaaaaattagccgggcttggtggcgtgcgcctgtagtcccagttgcttgggaggctgaggtgggatggcttgagtcctaggaggttgaagctgcagtgatccgctattgtgccactgcactccagcctgggtaacagagcgagaccctatcatgcccccccaccccactggaaaaaaaaaaggttcacatacatcacataggtaattttcaccttttagatcatcagccagtctactcaggggagggggcagaaaagtgagagtggtggggaccaaaattaactttattattattattatggacatggggtggtctcactctgtcaccgaggctggagtgcggtggtgagatcacagatcactgcatcctcgacctcctgggctcaagtgatcttcccacgtcagtctcccaagtagctgggagtacaggctcatgctaccatgcctggctaatttttttatttctttattttttgtagagacagggtcttgctgtgtttcccagaactccccacctcaagcattcctctctcctgccttggcctcccaaaactctgcaattaaatggtgtggtgagccaccatgcccaaccaacaaattaatttaatagtaaacagtttaactgatggacgcctaatgagtatatagatctttattccatcaacccatttatctgtataacttcaatctaactaaagttcactaaaatttattaaaattcaaaagccatgctctttttaagcttctagtagtacattttgtagcaagataaaagtgaccaataaaaaagtttgagttgtgtttttctgtcgtatagcagtatactctctctctatattttttatttatttaagtattgagacatgtcttgctctttcatccaggctggagtgcagtggcgcaatcccagttcactgcaacctctgcctctctgggctcaagcaatccttccacctcagcctcccaagtagctgaaaccagaagtgtgtgccaccatgcctggctaatttttgtattttttgaagacatggggttttgccatgttgcccacactggtcttgaactcctcagctcacagaatccagccacctgggcctctcaaagtgctgggattacaggcatgagccccctgtgccccagccagttatgattttgttttggcatatattcatgggggtacaagtgcagttttgctacattgatatattgtattggggtgaagtcagggccttcagtgcatccatcactggcacaagacacattgtacccagcaagcaacctcctgtagtccatccccttccctctacatccccaaccctccaagtctccattgcccatcactccacactctgcttccatatgtacgcattatttaccaccaacttataagggagaacaggcaatatttgtttttctgtgcctgagtgatttcacttaagataatggcccccagttctatccatgttgctgcaaaagacataatttcattcttttttatggctgaatagtattccattttgtatatatgccatattttgtttatttagtgctccattgatgggcacttaggttgatttcatatctttgcttttatgaatagtgccgtgataaacatatgagtgcaggtgtctttttgatgtaatgatttcttttcctttgggtagatgcacagtagtgggattgctgcatcttccggtagttctatttttagttctgtgagaaatctccatactgttttccatagaaggtgcactgatttacattcccaccaacagtgtataagaagagttcccttttctcagcttcctcaccaacatcctgtgatttttttgtctttttaatagccattctgttgtgtgtaagatgatatctcattgtggtttttaatttgtatttctctgatgattggtgatgttgaacattttttaaaaattttactcatggcagtacacagaaattttcagggaagattaaaaggcatgaaaacatgactcttaatagacaattctagcaatatacaaactatttttgtttccctagagtcttgaattttttgttcaactcattttctggttatgaatttaaaatgattacagcatactgccaatgtttgagaagaaatctgttattggattaagtttaggaatcaggctgggcgtggtggcttatgcctgtaatcctaccactttgggaggctgaagtgggtggatcacctgaggtcaggagtgagccgagattgcccattgtactccagcctgggcgacaacagcaaaactctggctcaaaaataaataaataaataaataaataaataaataaataaataaataaatccaggattcataatattaattaatttatttaattttgtgacaaagtcttgttctgtcacccaggctggagttcgatggcaagatctcagctcactgcaacctccacctcctgggttcaaggattgttctgcatcagcctccacagtagctgggactacaggtgtgtgccaccacgcctggctaatttttgtatttttagcagagacgggggtttcaccatgttggccaggcttgtctcaaactccggacctcagctgatccactcacctcagccttccaaagtgctgggattacaggcgtgagccactgtgcccggctgatggtgaacatttttgatatgcttgtttgtcttttgaaaaatgcctactcatgtccttagcccatttgttaatgggattatttgttttttgttgttgagttgtttgagttgcttacaaattctggatattagtcccctgttggatatgtagtttgcagatattttcttccattcctcaggttatccgttcactctgttgatcatttcttttgctatgcagaagctttttagtttaatgaagttccatttgcctatttttgtttttgttgcccgtgcttttgaggtctcagtcatgaattctttgcctagatcaatgtctagaagagtttcccctaggttttcttcagtatttttagagtttcatccttacattcaagtctttaatccatcttgaatttatttttttctttcttttttttttaagatggagtttcgcttttgttgtccaggctggagtgcaatggcgcgatctcggctcactgcagcctccgcctcctgggttcaagcgattctcctaccttatcctcccaagtagctgggattacaggcatgcgccaccatgccccgcgaattttttgtgtgtttagtagagacagggtttctccatgttggtcaggctggcctcaaactctcgacctcagttgatccgcccgcctaggcctcccaaagtgctgggattataggtgtgagccaccgtgtctggccaaattgatttttttatatggtgagatacagggatccagtttcattcttctgcatatggcaatccaattttcccagcaccttttactgaaaagggtatcctttccccagtaaatgttgtcgactttgtcaaaaatcagttggctttaagcatgtgggtttatttctgggttatgtatgctgttccatggatctatgtgtctatttatttatttattgaggtagagtcttgctctgttgcccaggctggagtgcagttgtgcaatctcagttcattgcaacctccgccccccgggttcaagcgattgtcctgcctcagactcctgagtagctaggattacaggcgcacgccaccacacctggctaatttttgtatttttagtagagacggagtttcaccatgttggtaaagctggtcttgaactcctgacctcatgatccgcctgtcttggcctcccaaagtgctgggattacaggcatgaggcaccgcacctggccctatgtgtctgtttttatagacactatgagtattatgctgttttggctactatagccttgtagtatattttgaagtcagaaaatgtgataacaccagctttgttctttttacttgggatatttttggctattcgggctcatttttagttccatatgaactttagaattgttttttctaattctgtgaaaaaatgatgttgatagaaattgcattgaacctgcagattgctttgggcacaatggtcattttaaccacattaattctttcagcctacgtgcatggggtgtttttccatttttttgtttcatctatagtttctttcatcagtgttttgtagttttccttgtagatttctttcaccttcttggttaaatatattcctaggtgttttatttttttgtagctatcataaatgggactgccttcttggtttcgtcctcgggtagaacattattggtgaacagaaatcctagtgatttcttttccttttttttttttgagacagtcttgctctactacccatgctggagtacaatggtgcaatgtaggctcactgcaaaggcctcccaaagtgctgggattacaggcatgagccactgtgcccatctgatttataaatttttgacagattatgcatgagagtgtgcttcttgggccaggcgcggtggctcatggttgtactcccagcactttgggaggctgaggcagatggatcacaaggttaggagttcgagaccagcctggccaacatagtgaaaccccgtctctagtaaaaatacaaaaaaatagtcaggcgtggtggtgggcacctgtaatcccagctacttgggaggctgaggcaggagaattgcttgaacccaggagtgggaggctgcagtgagctgagattgtgccattgcactctagcctgggcgacagacagtgcaagactccatctcaaaaaaaaaaaaaaaaagtgtgcttcttatcacatttacaggtaatatatgaagattgagggagagggaattctttttttttttttttgagacagggtctgactccagtagcccatgttataaataaaggtttggtgccacaaaagaaatagcactggaatataaaattttctttttaattctcagcaaggcaatgtacttctatagaagaatgcgcccttacagatggaacaatggtgagcacacacctggacaagggaggggaaggggttcttatccctgatgcacgtggccccgctgctgtgtcattcccctattggctaggtttagaccacacaggctaaactaattccaattggctaatttaaagagagtgacggggtgagtggtttggcaggaaaaatggttatggcagagcaggaaatctgaatgagtcagggtggagaatgagcaggtaatcggaatgacttagggtggaataggtaactggaattagtcatggtggagcaggtaatcagaatgagtcaaggtgaagcaggtaatcggaatgagtcagggtggagcaggtaattggaatgagtcagggtagagcagataattgaaaaaggttgctttaccaggaagttaagtttaaaactagaaagcaaagaattgaacctactgacaaactgattctttgaagagaaatttagaactcatatctaacattctgtcctcttgcatttccttacggctctttttcttcaaacttctttaacatgtcttggcttagttgttctacagattttccaaaagaagaagcttctttacataaggcagagaatagttaagggaggttttagtaagtgctgtttttatgagcctctgcaccaacccatggatgcatggtgtgacacagcacctgacaagagtaagtacacccattatggctgcgagggaagtaagaactgaggctattattcttttccacttactgaaccacttttctagccatcctgtaaaggagtcatttacccctgagttgttggctaactcattggacacagcactcagaccttgcaatgcctttgttatacttccatcagggacagtgttgtttgggatgaaggtacaacatttgtgttttaatcatgatacaaactcctcctctttctgctaatatcatgtctaaggctatcctattttcccaagccatgtggcttgtagcccctaattactcagctattcctttaacagcatctctagtatagttaataaattgctgttggttgtaatagatgtagtttatccaatctacatttttattaattgtcacccaccaaaatattgactcaaattctgtagctatttgattttggggtttaaattgatctggtattccctgtgggactccaattgcatttaaatagatgtgagagtcgaaagacccataagaggcttcccttgctttatgacgtctggtttttccttcctctgcttgatgaaaggccagagtaaaagggatagccgattggactagagcataaatactgctctaattatttggcagagtgtccagtaaaggtcctccataatcccaccatacatccgcttagggatgaataagggcagactgataggtcagctcttggaagtgccacacttcactgcatcctgttaagtctccaaggaatgccaaatttttcccttggtcgttggagacatgaggtaaaattgattttggaaaatggaggctggatggcccttgggggctgacccgcagcatgctggactttgggatatagcagagagagagtgtggcacaacttgttactctaggctgtagaatcctggaaaagagctaccatgcagcccatgcctggttgactggatgaccaccctagtggaaaggggacagtctgggcctctggcctgcggtgcgcacaagcataacaattgcttttgtttaacgtgcagacggaatatttgatccattccaaccaggcatttgcatcttggtatcttgtcttaattgccgaagtttgttttaagtctttaacttgtatgatagctatcttggtcttgtcgttagatggaggagtggcaattgttcagttgtgagaggttttggaagaaggcttagaggaaggtgcaggcactgggggatcaaataaacacatttcaaagaatccaatagggtctgtccctgaaacctcagcccccataccataaaactggcttaaagaagggaactggcttagaaaaggggaagaagtttgagggttcgagataataacctgtattggaatgcactggtttagctgacccccagttgggggttggctgtccctctagtaaaatgaatgtatggttttaggaaattacaaaaactggttggggcagtccatccttgctctttagtggtccacagaatgttggacaaactacggcataaaagctctacactggggggcaagactcctggttgacactggggtctttaccaaaatctccctggattaagtggtctcaattcactaatgtctagtctcaggagagtcaggagggagagaggtacttttctgaagtagagagctgtctttgacttggcaagtccccacagggtataacaaggcaagcatcaaatgcaatagtttgaagagaaattgacttggttatgttaataactagatggtcagcaatagagcgaggaaagaagaaagagtaatagaatagatgaaagagagtgaaatttttctttgctttagtttggtagggttttcccctgggactatggcccatgactctggagggggcggcgctttcttgactcaggtgtgatgagtctattccctttcccactgtaagaacagcagtcttggtggttagcagcacaaggtagggtccttcccagggtggctggagttttccttctttccaccctttgatgagaccatgatcttcaggctgttgctggtttaccggaaattctaggggtggtacctgtgctaaaagacttttagttttgagggaaaggaaagtggaagataaaccaagtatacaatttctaagaaattgatcttttgttttaaatgtggggacatcagcagtggactttatagtccttggtgtcttcttactgagaaatttcctttagcacctatttttattagtttttagaccaaagaaagccaaataccattttatatttgacaatgcttcctgtatgatttttataccagaaaagctaaatttcacctttatattagtgtgctattagtgataaacttaattttaataaaacttgtagacacatttatccaatttttaatgtctgaccataaggtaagatttttatagactctttttaaccttgtataatttttgttaaagagcaggttagtgctttaagaaaaacctgttgtgcttttattttaatgtccagtttacagaaaagctggatgatacccctttaactttagccaatatgtttacaaacagaattttctttaaaattaatgtttcaaaacttgcttaaacctttaaaacaaaaaatttttttaaccttttaatgtaggtaaaaatctacattcttatgcctcattataatccttttaccaaaagtatatttactttccttacacaccttgcacataaactgtttcttcaatagttttacaatcaagaggcctaattacttgtacattatacaacatttcttgcataaattcccttttataactttttttttcacgactttcacagacaattctttgacatgcctcagctttctcacttgttgcaacatccctttctttaaacaaccagttaatttattttaggacaagaatttactatataacattcgtttttacataaattctcctccccacttttttttttttttctcaaagataataaccgttcttttccaaagtgaacttccttcatgtctgtggactagtctaaggccacaagattagaagttaggataatacatgttacactgttaacttttagcaaactttacttttgttgaaaaccttgtgaatttgggatttcaattattctttggtattaataagaccctgttcagtccatattaacttagaattgatatagatggctccttcctgattctgtaagtacttcaaggcttggctgagtacaaacagctggcacgtttgagcagcccaattattaggcaattttcctaactcgcttctgttagagtttccttatcccttactgaatacccattgtgtctttttccctcaatcacctgggaggaatcatctatcctcctgtcctgaagggagttcctccaaggtctggtcagacctttgtacggtaattaagatttagatcctgttaggaaacctgctgggttaagagaattttcagtggttaatgttaaatcatctttttctaacagaatagcctcatactttaaggttcttgagtcagtaagttaccttttttgctttttttttttttgacttagtatagttctgacctgttgagctgtgctcataatgtttcctctgaaagttatttttctactttcttctgctagcaaagcagttgccgctacagattgaatgcatttgggccatccgcaggttactgggttaaggatttttgattaggaaggctaatcagtggcctcagcttgtcagtggcctcaatgctttcaggctacgcccttgtttacagtgacaactgctgagaccaactcagtcatggagaccctaacccagtgtcgctagaggaagtaaagacacacacgcagaaatatagagtgtggagtgggaaattaggggtctcacagccttcagcgctgagagccttgaacagagatttacccacatatttattgacagcaagtcagtcgtaagatttactaaaagtattccttatgggaaacaaagggttgtgctggaaataaaggtatgggctctggctagttatctgcagcatgaacatgtccttaaggcacagatcgctcatgctattgtttgtggtttaagaacgccttaagcggttttccaccctgggtgggccaggtgttccttgccctcattccggtaaaccttccagtgtgggcatcaaggccatcacgagcatgtcaccgtgctgcagagattttgtttatggccagttttggagccagtttatggccagattttggggcctgttcccaacagacaacaaggtggtattggagtgttatagggtcacagagaagaccttcaattataggttttaaatttaccttggcttttaaaggaatagggtacactgttttctctttactacttctatctctctccttctttcttcctctctttgacttcctgtctctttctgtctctttgattccctctttgtctctctgtctcttcctctttctctctgcctctctttctctctctttcttctctctttctcctcactctctctctctctccctctctttcctctctgctggtctttccctgcctctgccagccgcttatgctgctgttctcccctctccttccccttccgctaggggagggaccagcaggagtggacctactctttcttccctagagaagaaaggaaaggggagttctgaatatttttcttactactggaggtttgtgtgaggttcaaccccctccccatggggatttcttacctctttttgaggttcaacccccccatcatggggatttctcacctctttctgaggttcaacccccgccttcaatggggatttctcacctctttttaacctccaagcatcccgactaaggaatacttcaccacatcctgtggctttctttccctagtcccgactaaggaatgctttactgtccctgcggtttctctctccttggtatgtcctaaccaaggaatactttaccaccccgcagctttttccttagtcccgaccaccaaggaaatactttacccgctcctgcggcttctccttccttggtctgtgcacagagttgtcaccacagtatgtgaggattctttaagctaggttgctggccagtttctctccgcgttgctgagagctcgggttattcctcccactgggtgggtcctgatttctcacccctgaggccgccacaagggggcggggcggacctcctcatgagagagaaccagagaccacccccagaggggaatgtaatcacaggagaccccccaaattgttataaagtttctgtgctgcaaaagaaatagcactcgaatataaaattttctttttaattctcagcaaggcaatgtacttctttagaagggcatgcccttacagttggagcaatggtgagcacacacttggacaagggaggggaaggggagtttatccctgatgcacatggcccctgctgctgtgttgttcccctattggctagggttagaccgcacaggctaaactaactctgattggctaatttaaagagactgacagggtgagtggtttggcaggaaaaatggttatgagagagcaggaaatcggaatgagtcagggtggagtaggtaatcaggtaatcgggatgagtcagggtggagtaggtaatcgaaaaaggttgctttatgaggaagttaagtttaaaagtagaaggcaaagaattgaacatactgacatattgattctttgaaaagaaatttagaactcctatctaacacaggcaattatgtttcctaagaaatatgaatggactgtcagttgtggaaaggtaaaacctggccgggcgcggtggctcatgcttgtaatcccagcaccttgggaggctgaggtgggcggatcacctgaggtcgagagttggagaccagcctgaccaacatggagaaacctcgtctctactaaaaatacaaaaatagccgggtttgctggcacatgcctgtaatcccagctactcaggcagctgaggcaggagaatcacttgaacctgggaggcagagtttgcagtgagccgagatgacgccattgcactccagcctgggcaacaagagcaaaacttcatctcaaaacaaaacaaaaaacaaacaaaaaaaccagaatgaagacccaaacccatgatgaggtttatgagctcctataccatcttgaagttacagaaagaatgggggattggattctgatgaaagaggttatgggaaccgggagagaagaggaactctgttgggggaaataaaggattgctagggagaatgaatggatgcggatggagattaactggtaaatagttctctttagaatttgaatgagtctgagagacaggctttatcttctgaaagggcctgttcagttctgattacattcttggtcttccagggaggggaggaaaaaacagttgttcttctttggtgggtgaccctggagttttggcagataaaaatcttaaacttctttagaagagatggtaggggtggggaaccttggagagtccttgaggtttctcctttagttcagcatgtcaatgtgccatattttggggtctcagtttttgagtcccaacacagtccattctttgaaaagtaaaataagcatgtagcttattttacatttaaagatttagagatacaaccttaaatactggatttttatacatgtagctagggtcttcctgaaaccgcctttgcaaaattatgactgagatagtgaaagagatctaacttaactgactccatcttgcttctaacctccaagctgtccttgttcattcctgggtgtaggctgaactaactttaggagaaacttagtttatagttcatagtttaaacaaagactgtaacagccctttcccaaagcatacctccttcttgtctggggactagatttcctttgtaggactagcattagccataagattagaaattatactttagggctgggcgcggtggctcatgcccgtaatcccagcactttgggaggcaagtggatcaattgaggccaggatttcgagaccaacctggccaacataatgaaaccctgtctctattaaaaatataaaaatcggccgggcatggtagctcacgcctgtaatctcagcactttgggaggccgaggcaggtggatcacctgaggtcaggagttcacgaccagcctggccatcatggtgaaaccccatctctactaaaaatacaaaaaattagccaggcatgatggcaggcgcctgtaatcccagctgttcaggaggctgaggcaggagaattgcttgaacttgggagtcggaggttgcagtgagctgagatcgcgccatcgcactccagcctgggcaacaagagcaaaattctgtctcaaaacaaacaaaaaattacaaaaattagcagggtgtgctggtgtgtccctgtactcccagctactcaggaggttgaggtgggagaatggcttgaacccgagaggcggaggttgcagtgagccaagatcacgccactgcactccaacctgggaacagagtgagaccctgcctcaaaaaaataattatggtttaggagtcatgcggccggaggctacaagattctgaccctcccagaactactcctaagatcagtgcttgagatattttgcagaccctgcacttgatggatcagctggccccacctagatcaataaactggctcatctgatcttgtggcccccgcccaggaactgactgatcaagaagacagctctgactccctgtgacttcattctgagcaatcagcactcctggctcactggctcccccagtcctcaccaagttatccttaaaacctctgctcgctgggccgggcacggtggctcacgcctgtaatcccagcactttgggaggctaaggcaggcggatcacttgaggccaggagtttaagaccagcctggccaacatagtgaaaccacatctctactaaaaatacaaaaaacaatagctgggcgaggtggtgggcacctgtaatcccagctactcgggaggctgaggcaggagaatcacttgaacccaggttgggaacattgcattgagtcgagatcagccattgcactccagcctggggaacaagagcgaaactacacacaacaaaacaaaacaaaacaaaacaaaacaaactctgctccctgaattctggggagactgatttgagtaataataaaactccggtcttccgctcagccagctctgcgtgaattactctttctggattgcaatttccctgtcttgatgaatcggctctatctagacagtgggcaaggtgaaccccttgggcagttacattcctaggccttagccagggaattaccatgtatatgatgatgaattcaggagagaagagatgaagagaaagggagaaagttttatcttggctgggcactgtggtttacgactgtaatcccagcacttcgggaggctgaggcgggcggattgcaagatcaggagattgagaccttgctggccaacatggtgaaaccctgtctctactaaaatacacacaaaaaaattagctaggcgtggtggcgtgcacctgtagtaccagctaattgggaggctgaggcaggagaatcgcttgaacccgggaggcggaggttgtagtgagccgagattgcgccactgcattccagccaggtgacagagtgagactccgtctctaaaaacaaaacaaaacaaaataaagaaacaaagttttatcttggattacctagagttagaaaagttaagaactggaggtggcttccagtcgtgtgacctgagcacatgaggccagtggaatgctggagctgaaagcatctgtgtggcagctggacatgtccttttcactggcttcagctgccttttttagatgaagattgtattcacagtgactgtgagctccttaggcacagaaattgaatcagtgttaaacactattgtatatgcctggcattggcacgaggatagtatagatatttccaagatctctcctcatggccatccttggatcccagagcctgggacagtgttagggatcttggaagcactgccaacatgtctgacattcaagaagccactaacagctcctagttgtaaacctgcatgagaaccagaggtctgcacaagtgacagaaagtgacctcagaggtgagtcttagcttcctcaagtcactatgtaactgcccagtgcattcattttgcccagtggcccagatacagtttaattcatgcatagccagctgtacaagagactggagatttattactccaatcagtttcccttaaaatttggagactgaggttttctaaggataacttggcaggttgggagccagagggtagggagtgctgattggatgggtcagagatgaagtcaccgggggtcaaagtgggtttttctagctttcttttgtttctgggtgggatcacagaacaggttgagccagattattggtctgggtggcaccagctggtgcatcagaacgcagggtctaggaaatatcctcagcaccagtgttaggttttacaatagtgatgttatccctaagagcaactgggaaggttcagaatcttgcagcctctgggtgcatgactcctaaaccataatttctaatcttgtggataatttgttagttttacaaaggcagtctggtccccaggcaagtaagagatttgttttgggaaaggacttttattggctttgtttcaaagttcaactttaagttccacccaaagatagttcagcctatgcccaggaataaacaagggcagcctggaggttagaaccaagatggagttggttaggtcagatccctttctctgttgtgactttctcactgttttagttttcatcaaggtgatttcaactattggagccagctttgagcaaacagctgtggaagaagtgagagacaaattggggtcaccatacaatcagcagagaccatggcaagatatattttgtcatttcagtgaaaatttggcttaggtttattgtccgagatcggttgataacttatttgtggttgttcaggagttttaagattactagtttagaaaaacaaagaaattctaaaggattttgaagacttggctggaaaactcccgtggtcaaacactttaattttatggaaaattaaggtgtttttttttttttgagatggagtcttgttgtgttggccaggctggagtgcagtggtgcgatcttggctcactgcacaaactccacctccctggttcaagtgattctcctgcctcagcctcctgagtagctgggactacaagcacccaccaccgtgcccggctaatttttgtatttgtgtttttagtagagacagggtttcaccatattggccaggctggtctcgaactcctgaccttgtgatctgcccatctcggcctcccaaactgctgggattacaggcgtgagccactgcgcccagccaattaatgttgattttaaggaacaaacaaacaaacaaaaacaaagctcaaaaagataattcagaattcaagtaaaaggaaggttcatgatggacaagaagtccaaacagatgaaagagatgttaaaaaaaagagttcattcactacaatgttttagattcacacatcttagattattgtgaaactccagccatcaaaggagatagcaacattagtaggtgatgatttggcatcttgcagagatgagactgatgaaagcaaaaaagaagaaactgagcctcaagtgtaaagtttagagtcatgtgcaacagagtaggagagaaatactgctttccctcaaatgagactggaagagattctgggggtgatgtttaaggctattttaagtggaaggccgacatgaccaatttgatgttgcgattcttttgaatatccatgataatgaaatcactgtgggcatggcattgactaaagcgagtctccactgaagacgtatcacacattttggacctatgactcttttgtacctatcaacattttggacctatgggcacattttggacctatcaactcttacccctgggatactcagcctctgtggtctgctaccttatgttataatagtcgatccaatgtgtggaacaggggcaataccaatagaggggactacttaatgttttcacgttatattctggtgataataatcctctggttgtgaatagagcagcaaacaacatcacatctttattgaccaagagccaaattaaagaaggctaaccatccttgcccatagatgctgttcaatgggataaatgcaatatgccattaagaactggctctgtggatattattgtggcagatttgccatttggaaaaaagatgggatccaagaagagaaactggaaccttcatccaccttgcctatgggagatgagttgcgtctgtgtacacctacaacaggccaagctgtacgatgtactcaggacgcgaaatgctttaccaaagcattatctggcatgtgatgtgtatggtgaaaagtggatacagttcgggtgaacattgggggtctttgtgctgcagtttatattttgaaatgtacacctcaagcttttgttcatccttcagaacaagatggagaaacaggagctctggtaatgcaaagattgaagctaactaatagtactcgtacttcccaacactggaaatgtcagcatgaagaacttgctttgagagcaaaatagtatttaaaaaagtgcagtgtgcactctttaaacctgttcagagctcttcactctagttggcaaaagatgtgaatgtaatgtaatgtaatgggattgaaaaagtcttatgagaaagcagagcttttccttggcactgttttgtgttttgggcaattagtattttgcttaaaatgcttttaaagatgcctagtgaaaagcctagtaaaacgctctgagatttgggtgtagaacgttttattttcaggcttaaaactttttttttaatattatagttttttgtagagataggggtctcaccatgttgcccaggctggtcttgaactcctgggctcaagcaatcctcccaaagttttgggattacaggtgtgagccacaacacctgacctattttcaggctttacggcctgttttctattttgccaagcggaaagctactctggcctaaaggaaaggcagagaacataattacatcttaggccacatttcattgcctgcgtatctgtgctattcagttgctcaaattctttaactctagaagtgaagtattgcattttgtgaacaatgtttgccccataagatgaaatctcacaagtcctataggaaagtttaccatctgccttaaaaattaaaatgcacatctgttattcagattaatatgcatctgttattcagaactaaaatagaggactaggatttatcaaagggattgcaaaaatactgttagtagtagcatagagcattactatttgtaaacagcagaggcagggcgtggtggctcacgcctgtaatcccataactttgggaggccgaggtgggtgatctcctgaggtcaggagatcgagagcatcctggctaacacagtgaaaccccgtctctactaaaaattcaaaaaattagcccggcgtggtgaagggcacctgtagtcgcagctactcaggaggctgaggcaggagaatggcgtgaacccgggaggtggagcttgcagtgaaccgagatcacgctactgcactccagcctgggcgacaagccagaatccgtctcaaaaaacaaaacaaaacaacaacatttattagactagaaaagcaattcaaaagtgaataaccaggccgggcgcagttgctcgtgactgtaatcccagcactttaggaacccgaggtgggtggataacctgaggtcaggagttcaagaccagcctggctaacctggtgaaaccccttctctatgaaaaatacacaaattagctggacgtggtggtgggcgcctgtaatcccagctactcgggaggctgaggcaggagaatcgcttgaacctgggaggcagaggttgcagtgagacaaaattgcgccattgcactccaccctgggtgacagagtgagtctcccatctcaaaaaaaaaaaaagaaaagaaaaaaaaagtgaataacctcagtatggattcaatgttatatctgttataaaccaatatttgggnnnnnnnnnnnnnnnnnnnncggcgctctcttcttaaaaccccggttaaagagaaagctctctcccaccccaaaggggggggcaccaaaaaggttgggaaaaatggaaaaaatggaaaatggtaaaggggggattttaaaaaaaaagttctcttatttggaagaaaaaccaggtggctttttcccccgtgggcccactggtttttggtgggtttgggggcccaaaaattaagaaattctggcaccataaaaatggctttttaaaaaaaaatcccctaagtggaaaaaagccctaaggttaaacaccgctttctgaaatattttgggggtgtaaaaaccggtttttatttttcccgggtcttaaaaacctttttttttttaaaataataaaagagttttttgggaaaagaataagggggttcttccacccattgttggccccaggccttggttctttaactcttcctggggcttccaaagcaattccttccccaaaagttttgggggattacaagggtgttaagcccacaaaccccctgaccttatttttcaggccctttcgggcctgtttttctatttttgccaagcggaaaagcttctttggcctaaaggaaaggcagagaacataattacatcttaggccacatttcattgcctgcgtatctgtgctattcagttgctcaaattctttaactctagaagtgaagtattgcattttgtgaacaatgtttgccccataagatgaaatctcacaagtcctataggaaagtttaccatctgccttaaaaattaaaatgcacatctgttattcagattaatatgcatctgttattcagaactaaaatagaggactaggatttatcaaagggattgcaaaaatactgttagtagtagcatagagcattactatttgtaaacagcagaggcagggcgtggtggctcacgcctgtaatcccataactttgggaggccgaggtgggtgatcacctgaggtcaggagttggagaccagcctcgccaacatgggaaaccccgtctctactaaaaataaaaaaattagctgggtgtagtggcgcatgcctgtaattccagctacttgggaggctgagacaggagaatcacttgaacctgggaggcggaggttgcagtgagccaagattgcgccactgcactccagcctgggcaacagggcgagaccccatctcaaaaaaaaaaaaaatagcagacacattggtatttgaggtgtgggacccacaaagcaaattaaaagaaatgttttcttccagtgaaaaaaaaaaaaaggacaaatgaagaactgggatgatgcatgtgagcttatggtggctgtcctctgagctaagggaaaaggacactgctcgtttttgtgagcaacataggtatggttcccacaaaaagatccttgtagcactgttgaaggaggcccaacattagaagacaagatcctggataaggcagtgcttttaggaaatatgcttccagtggctaggggctatcttcaagtgacattgtatacagaagacatcatcagacaaaaaaaccatcaaggaacatttgagcacccaagcctcttggggagccccataaataattggttattattgttaataattggttattaatgatgtggtggtgtgtgtttagaagttctgctttaatgcaagtaagggtaacaagacaagaaaatttaagtataaatgtaaatgggaccttgtctatttctgtgaggctgaggatttttacttaggatacctaagattttttttttttttttttttgagatagagtctccctctgtagcccaggctagagtgcagcggcacaatcctggctcactgcaacctccacctccggggttcaagccattctcctgcctcagcttctgagtatctgggatcacaggtgtacgccaccatgcccggctaatttttgtgtttttagtagggacggggtttcaccatgttggccaggctggtctcgaactcctgacctgaagtgatccacctgcctcagcctaccaaagtgttgggattacaggtgtgagccactgtgcctggtctaggatacctaagatttttagtgctgactgggcgtggtggctcacacctataatcccagaactttggaaggccaaggtaggcggatcacgaggtcaggagatcgagagcatcctggctaacacagtgaaaccccgtctctactaaaaatacaaaaaattagcccggcgtggtgaagggcacctgtagtcgcagctactcaggaggctgaggcaggagaatggcgtgaacccgggaggtggagcttgcagtgaaccgagatcacgctactgcactccagcctgggcgacagagtgagactctgcctcaaagaaatagaagatttttagtgccttgtcttaaaaaactacacttggaagcccaatatatgagcaaatgggctgtattcaaaggaggaattggagtcccagagccctgctcactctgtactcctattttaactaccctcctaccccttcaccacctctgaggtggtggctcctggtggcacctctgaggaattcccaaggctctgcagaaagggtttgaaagccactattttaggtagatgtcaggtattaaccagtgctacaaatagaaattgttggttagtttcactatgtgttattaagaagtaaatattggctggacatggtggtttacttgaggtcaggagttcgagaccagcctggccaacgtggtgaaacccccgtctctactaaaaatacagaaattagccgggcgtgttggcacacatctgtaaacccagctactcagaggctgaggtacgagaatcgcttgaactcgggaggcagagcttgcagtgagccgagatggcaccactgtacttcagcctgggtgacagagcaagactgtctcaaaaaaaaaaaaaaaaggtaaatattttcatgtttctgcatggtcagggctttctgagcatagaaaagtagaacctgggttaaaagacaagccttggaagttaaaagatgacttaagggatataaaacccagagtgttggaggcattcccaagatcgtaaacccagtaacgcttatcttaccttctcctggagacatttatttatgttccaaagggtaagatcccagggatcttccccttttcttcccaagcagaatttgcttaccataggtagattgctttctttcactttctcaggcgaaggcggcagctgggcagttatcctgtacaaacctacagattcaaaattttgggattcttctcctgtggttcaacccttacctatcaatgggttttcattgcattgtctatggggtattaggtatgggaaaatgatgtatgtcttgacttaagtaataataactctgatctctgctccagaaactttgtgtttactttcaggttacaagaatgaatcaatatagagattaaaaacttaaatatttttaatgtaaaacacttcttaggagaatatacttaataatttctctgtacagaaatgattgtatgtatacttcaggtttaagctttaccttagtattcctaaaacttttcagattatatcagttttccttatagaggtgcttattgttagctgtttcatgttaaaggctactaatagtggaaaagtaaatgcttctgtaggatgtgattagctcactcgttgatagggttagacctgcactgaacacagtagattgcttaactgtcacttaaataatgatctcattgataaagggagaattagaagtggcttgttttaaagggtttccgagagtcaaattctactgcttcattaaaatgtggtattttggggccaggcacagttgctcacgcctgtaatgccagcactttgggaggctgaggcaggcagatcacgaggtcaagagttcaagaccagcctggccaacatggtggaatcccgtctttattaaaaatacaaaaattagccaggtatggttgtgcgtgtctgtaatcccagctactcaggaggctgaggcaggagattgaacccgggaggtggaggttgcagtgagccgagagcgtaccactgcactccagcctgggtgacagagcaagactctgtatccaaaaaaaaaaaatgtgatattttcatttccaattatgcaaggtagtcaagcacaagagaaatgttttatacatatttacttctttgtagactaatattcctcacccaagtgtaacacaggtattaatgcattaagttatgcttataaaagtttttcactgaaaataataaaattgctgacagattatttctatatgaagagacatagagtaggaatattgttttctagatacaagactaaaagtttatttaaaaatgagtaaatatggctgagtgtggtggctcacgcctgtaatcccagcactttgggaggccgaggcaggcagatcacctgaggtcagaagttcaagaccagcctgaccaatgtagtgaaacccatctctactaaaaatacaaaaattagccgggcgtggtggcatgtgcctgtaggccgaactactcgggaggctgagacaggagaattgcttgaacccggggggcagaggttgcagtgagctgagattgtgccacttcactccagcctgggtaacagagtgagagtctgtctcaaataaataaataagtaaaataaataaataaaatgagtaaataaaatttttatgtccctagcatttacatatttgtattttttcaattgttaaaatgatggatacattttgcaaaaaatgtgaaatatttaggaaaacagaaagcaaggaaaaatagagatctctttttaaaattgtatttcttgagacagggtctggctctattgcctaggatgaagtgcagtggcatgatcacagctcattgcagccttgacctcactggctcaagtgatcctcctacctcagcctgctgagtagctgggattacaggcatgtgccaccaggcttgactaatttttttgtattttttttatagagacagggtttcctcatattgctgaggccggtctccaattcctgtgctcaagtgatccgcctgccttggcatcccaaagtgctgggattataggtgtgagccaccacgcctggccagataatttctttatgtccggtttttacacagatgtggcagagagacaattggagtagtatttttaggttttgtggctggcattggcgaaaagaggtctggtttctgtgacccttcttagggaagagggattctagttttttttaattgttgtcgttgtttgtttgttttgagactgagtctcgctgtgttgccaggctggagtgcagtgatatgatatcggctcactacaatctctgcctcctgggttcaagcgattcccctgcctcagcctcctgagtagctgggactacaggcacgcaccaccacgcctggctaatttttcttattttagtagagacgaggattcaccatgttggccaggatggtctcgatctcctgaccttgttatctgcccacctcggcctcccaaagtgctggaattacaggtgtgagccaccgtgcctggccggattctagtttttatagctatcctcagaggagcatgggactgagagataggaaggcaggaggtcagagaaaaactttggcttctgaggctgctgtgatgcctacattttgggtgtggcttctgtgcctcaacaatggtaaacacctacctttcttctgggagggagtctggaattgtgctacatggtatgcagagagtgcctatgtaaatagtcttcagtgaaaacctaggttctgagtctctaatgggtttccctgggcagaaactttgtgtgtttctatatctattttttgttgttgctggagaaagaagcatgcttgatatggccttccatgagagcaaaagaacataagcagcctctgcatggcatgaattttttccatctctacctgtgtcttttcctcttgttggtcctgtcatatgtcattttgctgtagtaaaccttagctctgtatacaaccagatggttaggtcctgtggatcctcctagcaaatcactgaaaatatgggtggtcttgggaaaccctgaaacaattccaaaggcagaaaccataaaataatttttttctttttttttgagatggagacccgctttgtcgcccaggatggagtgcagtggtatgatctcggctcactgcaacctcttgctcccgggttcaagcgattcttctgcctcagcctcccaagtagctgggattacaggcatacgccaccatgcccggctaatttttgtgtttttagtagagacggagtttcaccatgttggtcaggctggtctcaagctcctgacctcaggtgatccaccctccttggctttctaaagtgctgggattacaggcgtgagccaccatgcccagatgaaatgatttttttaaaacatgaaatcttaaaacacctttgaaaagtgaagagcagatagggaaaaattacttttactaaatatgactgataaaagattaatattcttagtgtatgtataattcatataaacctataagaaaaagataaatgtgcatgtagaaatatggaccaacatcaagaataatttataagagaagatataaaaagagcagatttaaaagatgttcaatttcagaagtcattaaataagtacaaattaaaataatagtgacatgcaaatttttaactgttaggttgcagcaaacaaacaaaaactccacaaacccaggagattatgtttagggttatggaagatgatagagaacatgattttcatagcatactgatatatacacacacacacatatatataatattatatataccctttttggtggacggtttgataatatgtattaagagtattaaggaattcataacatgaatatggctaggccactttaaagcctacctctgtctttggaagcaagttctttgcttccccttctctatctccaaaaactctgaaagcactaaagactaatttttacctttactacctgaagagaagtctctgggaggataccttagtccagcacatagaaatttctaaacttctctccagacatttctcttgctcttcagagttgctcactggaagctgttaaaaacaaaatcaaatcataaaacaaatctctcacatatgtatcgcccccacgtttcttccaagctgcctcttcctttcccttctattcctccgtgttaaatatctaaactattccatggaatgggctctctctatatttttttgtgtcaagaggctctttgtattcacactcttaacactgcaacactccactgtcttcatccaccccatgcatattttttttgctgtgacaattataattctccttaagtacctatgaagttgtttgatcaaccaacctagaatggtcactactttgccagttttcccctggatgggatgcatttttcttgtttgcactaaagtcttccttttggtcagtcttctccgtaggagaatcacgtcaccaatgttgagaaattccagggatcttttgggtttgtgagcattcttatattgaatagtaatttgcagtgatcatttcccctccagtttctggttcaatcccttctaatcctctggacagctaacttcaggatggcccgttaaagaagcctgaacacctaagttttttcctttgacttgttgacttttggttgtgcattctataactgtaggttgatttataaaatctataaattggtaccattttgtacccttccacataccaatttgaggtgattttcttttttatttttttgagacagactcttgctctgtcaccaggctggagtgcagtggtgcgatcttggctcattgcaacctccgcctcccgggttcaagccattctcctgcctcagcctcccaagtagctgggattacaggcgcccaccactatgcccagctaattttttgtatttttagtagagacggggtttcaccatgttgggcaggatggtctcgatctcctgacctcgtgatccgcccgcctcggcctcccaaagctctgggattacaggcatgagctaccgcgcccggccgtgaagtgattttcaaatcctaaatgatttgaaaaggaattatttgcatattttaagttgatattttaaagttgtcatcgcttatgtaaattttatactgtaaaccaaggtgagaataagatctgggatatgttaggaatctgctttcctttgccttgtaggagaaggcttattgtgaaagaaggcttacttacaggttgatcaattgtaggaaagaatacctatggaagttgaagatctggaaattgatttactgaaatgattcatgcatcccttaggcaagtattttccttttttgttagacagggtcttcctctgttgcccaggctggagtgcagtgatgccatcatagctcattgcagccttgacctgctgggctcaagtgatccttccacgtcagcctcctgagtagctgggaccacaggcatgcaccatcattcccagctgacttttttactttttatttttatttggcaaagatggcatcttgctatgttgtgctggttggtctcaaactccagggctcaagtgacactcccaccttggccttccaaatgttgggattacagatgtgagtcacctcgcccagcccttagggaattcttcacatattccaatttgaagattgccactaaaaggacagtgaaacagtctaccctgaaatagacatcctagttgttgatggtggtaactcattcagaactcatgctgcctctgatgcctggcatctttattgggcaggactggcggggttgtgctgcagtacaaattagcccaatctcagttgctcaatacaataaaaacatcttacatgtgtagctacactatttgaaatttgtgggctctaaggagagtagaggcctggaggatttcatggggtgtttttaaaggtcagagttggaaatggcttttattatttttgcctgtgtttcactggcaagatcgaagtcatttgactccaacataattgcaagagaagctggaaaatgtggaagagcagtgagatttgggattagcactgagttgtactttgattgtgacatgctttaaccatgattcaaaagttctttttctggcctttttgtactatctgcaaatttctcaagcttttattaaaaaagtagtgttggctgggcatagttgctcacacctgtaatcccagcactttgggaggtcgaggtgggcagattacaaggtcaggagatcaagaccatcctggctaacacggtgaaaccccatctctactacaaatacaaaaaattagccgggcgtggtggcgcgcacctgtagtcccagctactcgggaggctgaggcaggagaaacacttgaactgtggaggcggaggatgcagtgagctgagatcgcgccactgcactccagcctgggtgatagagcgagactctgtctcagaaaaaaaaaaaaaaagcaggttattatataatatctagcacagattagtttttttgaacaaaaatggtgcatctgtgtatgcagccacccacttgtctatctctgaaaggatttatacccaaaacactaccaattattacctttaagtgacgaaaaaatgagtgatttcaattttgtcaattttctttagctctattttcttaattttttgaattgaattttttttttttttttagacagagtctagctctgtcacccagactgaagggcagtggcatgatctcagctcactgcagtctccacgtcctgggtttgagcaattcttctgcctcagtctcccagatagctgggactgcaggcatgcaccaccacacccagttaatttttgtattttagtagagatggggtttcactagttggccaggatggtctcgaactcctggcctcaggcgatctgtccacctcggccccccaaagtcctgggattataggcgtgagccaccatgcctgacccttgacttttttttttttttttgagacggagtctcgttctgtcatgcagactggagtgcagtggcgcaatattggcttgcttactgcaaccttctcctcctgggttcaagcgattctcctgcctcagcctcccaagtagcagggactacaggcaccttccaccatgcccagctaatttttttgtatttttagtagagatgaggtttcaccatattggccaagctggtctcaaactgctgaccttgtgatctgcctgccttggcctcccaaagtgctgggattacaggcatgagccactgcgcccggcctgaattgtttatgtaaagagaaaacatggaaattaattgcaaaagttgaggatttttttttctgtttttgttgtgtctctgtatttactttattaatgtaacagaggcttcagaaaattaatattaattagttgaattggaaggtgaattcctattttgttttttattatgcataaacatttgatgctgaaaattcatgtcccctctgcctccagagatttcagaaaaagaaatctaattaaaaattatcatctcgatgtgattcttttgtgagtgattgtgttaaagaggaataaagtggatgatgatgagacaataattaatccgtcaatacatactcatgaatttccatgatgaacagaattgaagcctccttgagtccatgaagatcttttactctccttttccacgaacctcatttcttatttcccatgaacctagaaattgaaaacaattattgcctgctgactcccaaattattatttccctggaatgtcttccagtggatactaattttccaggtaccctccactcctaaaatttcctatcaaactaggttgttaggaacagagcttcttctgtgacttcagacacatgctggaaaggaaacatcatgctaactattatagataaagcttcagcagattaagagagcatgctttgaagagaggcccattttctgcctcctcatgcataaggtctggtggttaaattctctgtaaatcatcaaattaaaaaattattttggtgtatatcacaggtttctgtttcatattgctatttgagcagtttgttttgtgacttggcctttaagaatttttttttaatctcaatagttggctagtatgggtgggaagggatgccatgattcctgtcacacagatgaaccacttgtgtgggcatctgtcaattatccctgctctggtgttgctcaagtttatttgtgtcgtctaaaccccagggccaagtaccaggggagtcctaccaagcagctttggcaagcatagaattgatggcagcttcattataattatacttctttgcatggttgaccagctgtatcatcataatagctttccatactagaggccaaaaagacagagagatatacaagctgctcaatatatttcaacaaattacattacaatttatgccttttccaactgtttcatgccttgtaatcatcccctactcccacccagcccatcagttctttcagaaatatgcaaaatttgactctagatatactttttaagtatagcgcattaagaagtgatttttttcctgttccttagaataatcatatgtttatcttttcttgttttcaaacaagaagttatttgctgtaatagatcatgtgactgtataatacatatatgataatgatgataatcataacaattgcaggccaggtgtggtgggtggctcatgcctatgaccgcagaactttgggaggccgaggctggtggatcacttaagatcaggaattaaagaccagcctggccaatatggtgaaaccccatctctacaaaaaatatataaaaatttgctggatgtggtggcacacgcctgtaatcccagctactcaggaggctgaggcaggagaatcacttgaacccgggaggtggaggttgcagggagccgagattgtgcctctgcactccagcctgggtgacagagctagactccatctttaaaaaaataaaaataacaattgcagcttttagtggcatttactttatgctgggggtatactaaacactttatatacaacatttcatttaaaacttgcaaactccatgagacaggtgcttcagatgaggaaagggaagctttgagaagtggagttacctcatgcaatgtcactgagctcttatatagtagagcagggagtcgaatccaggcagtctgacttttaatgatttaaaactcactcattcattttgacttaaatatactctagaagtcctttctgagtgtcttatcagataataaaattccattacctgatattaaatgaattcaatttacaagtttttgtttcattaaatggccaactatttacatgaaatgatattcaacatcattagtcatgagtgagatgcaaattaaaaccccaacaagaaacctttatacgcccattcaaacagctaacattaaaaaataaacaattccatggctgggcatggtggctcccacctgtaatcccagcattttgggaggctgaggcaggcagatcacctgaggtcaggagtttgagagcagcctagcctacatgatgaaaccctgtctccactaaaaatacaaaaattagtcaggcatggtggtgggtgcctgtaattccagctacttgggaggctgaggcagaagaattgcttgaacccaggaggtggaggttgcagtgagccgagattgcgccactgcactccagcctgggtgacagagtgagactccacctcaaaaaaaaaaaaaaaagaacaattcctatctttcaaagatatggaacatatggaactcttatacagtgtggtataagcattttagaaatctgtttagacagtttcttaaaaagctatacatgcacttaccatataactcagccattccgctaagtatttacacaagagaaatgaagacatgttctcacaaagatttgtacacaaatgttcacagcatcttgattcactgtagcctaaaaaccaattcagtgtccgtcaacagctgaatgtataaacaaatgtggtatatccatacagtagagtgtactcataaaaatgcaacaatgtgatgaaactcagaatcattatgcttaaagagagaagccagacacaaaaatacatactgtttttcatttatataaaattctagataatgaaaattaaattatagtgacagaaagcagatcagtggatgtctgaagctggaaattgaggaagaggtagtttgcaaagggcaggtggaaagttttaggtgctagaaagttctctttcttgattgtggaggtgattttgttacaggtgggtctttgttcttagagctcccaagatggtggcaggctgctcctaagatggagtgggctgctcccaagatggcggcaagccttttgttctctgacctggggttcttgacctcacggattccaaggaatggaacctagggccatgcagtgagtgttatacctctattataagctgtgggtcacggaagagaactgtggaacccagtgactaatgttcagcttgattaggatgaacctgggcacttagcaatgcaggaacaatggtgagcctttagcccagtcgagagcggcaatgggtgcctcactggatcagaaacacagcggacaccctgccagatctggaggggtggaagtcagcggcgggtctgcgacagcagcaaacagcagtggtggagagtgagccaaagctcagtttgagctataaaaatcacggaccagaagagtgtgcagttgcaagatttaatagagtgaaaacagagctctcatacaatgggaggggacccaaagggggttgcccactcccggctcaaatgcctggagtttatatcccaatcattgtcccttcccctgtgctctcaggcgatatatgatttgacttatttctttacctcctgcttttagcctaatttgtattttagtgagccctctttactacctgattggttggatgtgagctgagttagaagccccgtgtttaaaggtgggtgtggtcaccttcccagctagtcttaggaattcttagttggactaggaaatccagctagtcctgtctctcagtaccccccaacaggaaaacccaagtgctgtaggggaggttggccaatgaccactctaactgcttcctgctgaattggggcgtagtaggggtcatgcagttgagatttcctcaggaggggtgccttcggtgtcatcaacatcatagcatgtgctagcaggctggtccaggggtccgtggtagatcttagtcatgaactgcatctggggctctatttgaagaacaatttgtagttttacagcttcacagcttctattctggaagagataaacttaacaaggaggttaaagatacagggattgaaatgtatggcctgcagtgcaaagtgcaggggattatttcttcagcacacttcacaggccctgactatctgcttgacagtttttaaaaggcctggtccagtaaataatgatttggccatctgatgggtgctatcaatgcctaagtgaaaggtttggtgaagggttttaagtaatttccattggttagctgcaggcaaaagtatttttccttcttcggcggctagccatcctgaggggaggaaactattttctcttgagattccccattctatttcttctgccgagtactggggcttggtttcctggaggggattaccccatactctaggggtccttctataagcatttctaatggatggtcccgccttgcggatcttttggcttcggtatctgcttggtggttcccttctatttcccttttctttcctttctgatgaccccagcagtgtaagactaccacctctttaggtttctgtacagccaataataatctcctaatggcttcctgatatttgataggtgttccctcggaagttaggaattccctttctctccatattgctgtgtgggcatggaggactaggtaagcacacttagagtctgtatatatatttaccctttttccttctcctaattatagtgtaaaatggcccctgcttttgctaggatgtctctccctaacaaagtggggctttcaggcataattagaaagccatgtgaaaagagtaaagttccccagtcacaacttagtggctgggagaagtatctagtgactgcctgtcctaggacccctaggatagtgacagatctggaggacagttgtccgggacaggagagtaagactgagaagaatgtgccagtgtccaggagacagttaacttcctggccattaatggtcaagcatacctggggctctgtgagggtgatggcataggctggcacttgccctgggcaccctcagtcctgctgctggatcatctggttagtggcttctgactcaggactgtcccctagggcagtgggccttccagtgattcccttgacataatagacatggacgaaggggaggcttatttctattcggacaatcttttttaaaatgtccttgtggactgcactggaagcaagccctattaggcatttgatttgcccagcctttcgcttttccaaagcctccaaagtccgtttgcctgagggccacaactaagtggtggccttttttttttttatcccatttgtcccattctgcctgctcctcctgatctctattataaaaactgaggttgccaagttcaatagggtttctaagttttgctccgggcctaacgtggacttctgaagttttttcctaatgtctgcaactgactgagtgataaacttatcctttaagattagttgaccttcaatagagtcaggtgacagagagctatgcttcctcaatgcctcccttagtctctccagaaaggcagtctctcttcttttccttgtgttatagtggacatcattgaataatttataggcttcttcctaattttccttagtccttctggcatgcaagttagcaaatgtctgtggcaccaatctccatgttctgattctgtgtcccaatgagggtctacagtgggaactgcctgctggcctgtggggaataattctctttcctctgttgtcatcctatcattgacctgactgagataccagagatcgccagactctcgggctgcagttacggcggcacttctctcatttggggttagtgtctgatctagcaataacattatatctctccatgtcagatcaaaggattgtcctaacccttataaaacatcaatatagccatcagggttatctgagaatttacctaggtctattttaatttgcttcaagtctgacagggagaaaagtacatacactctgactgggctgaattctccagaatacatcttagggtcatttttgccttagggggaacattttctatctgaaaaaagaacatagggatgccagtgcctctagtcattttccaatgagcattagtcctagagtgtcctctatggtcctaatgcttattcctttccagggtgcataaccacccatggacctctgcttatcggattagttacgctcaccgatgtagcagtcctgcacctgttttcccacctttcttaaccacaaagaaaggggtatgggttgctggagtctagtggtcctttaacagcttgcccaacattgcctttgcactcagaggtgagttcctttccagggtgcataaccacccatggacctctgcttatcggaatagttaacgcttactgatgtagcagtcctgcacctcttttcctgcctctcttgaccacagagaaaggggttggggctgctggattctagtggtcctttaccagcatacccgacattgcctttgcgctcaggggtgagttctagagttgggctgggttcctgaatatttcataacaacccagctgccccatcaagatgcaacagttcttatgcaaatttatttcagagagggtgtaggtaaccttttgggttaggattgagatagagtttttgcccactagggcctttgtccttctttcctttgtaggaatgtgccctaattatcgaccttaaactttttcttgccccagattaagtccttttgggtaagaaatatgagagatgaatcctgtttatcctatgtgcctttttcctacgagaagaagagcaaggagaaaaagatgggtttgctttttttgtaagtactgtaaggcttgcctgagtgtaaacagctcacatgtttgagcagaccaattttcctaactcgcttttacaagtgtttccctatcaattactgcatacccattgtgttttttccctcagtcaccctggaggaaccatctaccttcttgtcctgaatggagttcctcctaggtctggttggacctttgtatggtaattaagatttaaatcccctgttaggaaatctgctgggttaagggaattttcagtggttagtgttaaatcacctttttctaacagaatagctctatacttttagacttttgagttagtaagctacgtttttgctttttttgaattaggataattctgagctggtgaggtgtgctcacaatgaggtttcctctaaacgttacttttctactgctgctaagcaaagcagttgccattactgattgaatgcatttgggccatccgcaggttagtggattaagaatttttgataggaaggctaggtatgtgttgtcagtggtctcagtgttttcaggctacgcccttgtttacactgacaacaaggtagtattggagtgttatagagtcacggagaagatcttcaattatcaattgtaggttttaaatttaccctggcttttaaaggaatagggtatatactgttttttctttaactacttgtgtatctctctttctctcttttcctctctctctctttcccttttctctctttccctctctctcttttggtagatggattttgggaacacggtggaaggacgttagcttgttgcccccatttgccactataggaatgtgtgcctccctttaatttactcaattcgctttcatcctgatctattatgttgtcatagacccagttccagttgttaaagtactgggtcatcagttctaaggccctggccaaggagccgaggcttggagattgtattgcagtgggggaagctgggtagaaattgggggaggagagcatcttacacaatgggagaggaatcctagccatttacaaacttggggtcctggcaagggtggtgggaaacgggtcccacataactgcccatgtcaagagctatatattgggaggggcaccagggacaagactccctgggttcatagcctagatgcctaaggacacagcgtagcgcttccttagatccctttggagatacaagcttctctaatacttgggagaggaagtgaaagtctgaagcattagtacctaggaggcagggatcagaggaaatagattcagaggtaaggagaattttgaggctacactttaaaaaagtcatgatcaggacccaggacgtatgggtcagaaggagatgtaggggcgcacgcatgggcaactgttgagtaaagacttctggctgcaccatgatctcgaccggccaatgctgggagtttgggatgacacctttctgtctctagtcagccctcagcttccccaggaaaattgtgaaagcagaagctggttccaggcagaccatcgctcccaaccagaagggttgggggttgttagaaagccttttcccaggaagcctcacacctgagtgttaagtccagcagccatgctaatcgtttttaactggccaacaggtgcctggtatttcctctgattctaaggaaggataggagagaatagcaagtgaaagtggtccaatattactcacagctttggagaatccccagacgaggccaccaaatgttacgggtgggtctttgttcttagagctcccatgatatggtggcaggctgctcccaagatggcggcaagtcttttattctttgacctggggttcttggcttcacatattccaaggaatggaacctagggccatgcagtgagtgttacacctctgttagaagccgtgggtcacggaagagaaccgtggaacccagtgactagtgttcagctcgattaggacaaacctaggcacttagctatgcaggaacaatggcgagcctgtagcccaattgagagcagcaatgggtgcctcactggatcagaaacacagcggacaccctgccagatccggaggggtggaagtcagcggcgggtctgcgacagcagcaaacagcagtggtggacagcaagcgaaagctcagcttgagccataacaaacacggaccagaagagtgtgcagttgcaagatttaatagagtgaaaacagagctcccatacaatgggaggggacccaaagggggttgcccactcccggctcaaatgcctggggtttatatcccattgtcccttaccctgtgctttcaggtgatatatgatttgtctatttctttacctcctgcttttaacctaattgtattttagtgagccctctttactacctgattggttggatgtgagttgagttaaaagccccgtgtttaaaggtgggtgtggtcaccttcccagctagtcttaggaattcttagttggactaggaaatccagctagtcctgtctctcaatttcacaggtgtatacatctgtcaaaatttatttaattgtacaatttattgtatttatagaaataatatatagtatatcatataaattatatataatgtattatatatagttatttgtataacataatttatttatataatgtatatcctgtgtgtgtgtgtgtgtgtgtgtgtgtgtgtgtgtgtatttttcttagaaacagggtcttgctctgttgctcaggctagaatgcagtggtgtgatcatggctcactgtattttttttgttttgttttttgagatggagtctcactctgtcccccaggctggagtgcagtggcatgatcttggctcactgcaacctctgcttcctgggttggagcaattctcctgcctcagcctttcaagtagctgggattacaggtgtgcgccaccatgcctggctaatttttgtatttttaatagagacggggttttgccatgttggccaggctggtcttgaactcctgacctcaggtgatcctctcacctcggcctcccagagtgctcggattacaggcgtgagccagcacacctggcccatcatggctctctgtaaccttgaactcctgggctcatgttatttcccgatctcagcttctcaagtaggtagggccacaagcatgccaccacacctggctaagaatattataatttattatatatagtgttattatatgtaagtcattcttcaataaagttaattaggtgctggatgcagtggctcatgcctgtagcctcagctacttagcaggctcaggtgagaggattgcttgagcccagaaggtcgaggttacagtgaactatgtatgttcctgccactgcaccctagcctgggcaacaaagcccagaccttgtctctcaaaacataaataaatgaataaagttgattataaaacatctaaagtacagcagaaaaaacaaaatttctgccatgaacatttttatacctatgtcttagcatacttatagaatgttcctgtgaattcaattctgccaacaggaaaacttaattaaaggctattaagattttaaaatattatggaaagtgtcaattgctctcctaaaagattgttactgattgatattccacaatgtatgaaagtgtccatttcaccccacttttgcgagtattgaatagttatcttttaaatgttttccaatgtggtgagaaaaaaaattttattgtgataatattcatcttttttattttaagtggaattgctatgaacatcttttgctatgatactggagatttttatttatttgtgagttggttgctcatgttcttttcccacttttccattacgctgtgtttctttcttactgatatgtgagagttctttatacttaaaaacctttcttctttattttttagcctttcgggctgtcatttatcttctaattgtgttcatggtatctttcactgtagtgcgtttaaatttttttttttttcgagacagagtctcactctgtctcccaggctggagtgtagtggtgcaatctcggctcactgcagcctctgcctcccgggttcaagcgattctcctgcctcagcccccctagtagctgggattacaggtatgcaccaacatgcccagctgctttttgtattttcagtagagacagggtttcgccatgctggccaggctggtctctgactcctgaccttaagtgatccgcctgcctcctcctcccaaagtgctgggattacaggtgtgaatcaccgcacctggactgtgtttctttttaaagacaacttattgatttcattaacaccctattgattcattaacattgaactcatgatctgcagcactataactcatgcctgaatgaagcttatctaacaatgtattttctccataaggcacatcatggccttcttatgcttgggaacactagacagcactatgcttctgggccataaacagtgagatcaccaacaaaaagcacaaaaatgttaaaaacgtaacattaaatatactgcaagaggacacttgtttatagtatgagaggtgaaacaagtatcaccttgttcaacctcagctgggaacatgcacaatgacctactcaaattttcctgcatctgtgcatgtctgggaatgaccgtgaaagctccacatgtattgattttggggttacaaataaattttagtgagtaggctgggcgtggtggctggctcatgccggtaatgccagctctgtgggaggctgaggtggatggatcacctgagatgaggcgttggagatcagcctggccaacatggcgaaaccccgtctctactaaaagtacaaaaaatagcgggacatggtggcacatgcctgtaatcttagctacttgggaggctgaggcaggagaatcacttgaacccgggaggtggaggttgcagtgagctgagatcactccagcctgggtgacagagcaagactccatctcaaaagaaaaaaaaaaaaaatttagtgagtagtcaaattcccaaatacagaatctgagtattaactgtaattcctctgtggtgctgctgccatgtgtacaatgagtcagtaaaagcttcatagtggaaatatttatcaaaacactgcagggggctgtatagcaggagatacacagaatgatacttcactcttgttcacaaatgtagtataatttataatttatcttttaatttttaaaatcaaagttttaggtatacttggttttaaaacttcagaagttctgcagtgttaattatgaagaagagtaaccccttatgcctttctgccccttccctttgcccagagataacaaatttcaattctttttgccttttttttctgccaaattgctaaataacctgattataatgttattgattattttgttttttttttaaggcactatcggtagagataaagactaaatttcaggccaggcacggtgcctcatgcctgtaatcccagcactttgagaggtcgaggtgggtggatcacctgaggtcaggagtttgagaccagcctggccaacatggcgaaaccccgtctctactaaaaatacaaaaattaactgggcctggtggcaggtgcctgtaatcccagctacttgggaggctgaggcaggagaatcacttgaacctgggaagcggagattgcagtgagccaagatcgcaagcctgggagacagagtgagactctgtctccaaaaaaaaaaaaaaaaagactagctttctttcactaccatttgaacaaatatgcatgccctttccatccttccaaattatacattttgttagatcactattcagtatttaggttgttattatattgtttcatcaaactaaaatctggcctaagaaagcctccatactcacatacttgagtttttacctacaacccacaacctaatttagtaggtaagcaaactgaaaacctaacttaggggtatgcttcaataacagttgctgactctcagccagtcccagcagctggacctcaaagacttaagccaccagctattcagatcgtgttctgataaggcactagctgtttctataccttgcttctgctccctgcacatcactttcctttttctatccataagttctctcccactgcgcccactatacaagcagcgctggcggccctctaaatctgctgtgacttgggggagggtggggaggggttgtccgatttcacaaatcatttttccttgctaaattaaactgttaaattacgtttgtttaaaaaattttttgaaatagtacaattattattcatactctgattacattgctgctcatgtataccttcttatttctctttgttaatatttgtccagtttctttaattgccttctcaatatctatcctccatttatcccataccgcaatgcaagtgcaaacctctcagctattgtgttggtatcttccttgttgtcatcctgagctttcacttcacccctctgctttgttttattttattctttttgtattttattttatttttgagatggagtctccctgtgttgcccaggctggagtgcagtggtgtaatctcggctcactgcaacctctgcctcctgggttcaagagattatcctgtctcagcctcctgagtagctgggacaactggtgctcctcgccacacccagctaaatgtttgtatttttgtagagatggggtttcaccattattggccaggctggtttcgaattcctgaccttaagtgataggtccgccttggcctcacaaagtgcggggattacaggcatgggccaccttgcctaccattatctgatttttaatagtttgtttgaatcaggctctaagtgaggctcatatactgcggttggttgacacttttcttaagtctcatttaatttggggtcttcttctacatcttgcattttccttgcctttttattttttaaagaaataaacatttccatttcctacagtgtttcaggcattctggatttttctgcctgcttccatatggtgtccttgaacatagtcctctgtctcctatagctcctgtcacttatttgtaagttggatctagagtcttccttatattcaggtggggaggaatgattttcttataaagtaattttctaaatttctagattacctttgaaagtaatttttccgagaaaggatgcatgagaggtagtttttgaaaacctgtgtgactaaaaatatatttttttctaccctcacacttgacttgtgctttaattgggtttagaattttagagagaaagaatttctcccctcagaattttaagggttttttttttgctccagttttttgtctttcagcattgttgagaaattcaatgtcctcctgataaccaatactttatatctgacctgcttttttctccctagaaatgtttaagaccttttgtcagagaagtcagtattccagattttcacaatgatgtcttggtgtgcttgctctgtgtctttttaaaatccattatactgggccagtagagggaccttccaatctggaaatttatgcctttcagttctaggcaattttttctgaattatttctttggtaatattctcttttctgtttttgctgttcactaaagaagctcatattattaggtttcctggactgatgttttatttttcttaccttttctccattttccacttttattttatttttttgttctgctctgtaggtgattttcttatctcgatctttctgcctttctataatatttttccttctatcatatttttaagtgtcaagggccacaacaagcaggattttgtgagctgcagaaagaagttggatttcattctaagtttagtaggaagccatagaggattttgagcagggaaggatattatgttttacataaaaaaggatcattctcactgctataacaggttatctctgctgtaagccattgtattaatctattgccatataacaaaccactccaaaacttagtgcgttaaaacaagactttatttttttctcaaagttctgtgggttgattgggcaattctttctttcttttttttttttaagacagttttgcttttgttgcccaggctggagtgcaatggcgccatctcagattactgcaacatctgcctcctgggttcaagcgattctcctgcctcagcctcccgagtagctgggattacaggcgtgcgtcaccatacctggctaattttgcatttttagtggagacagggttggccaggctggtctggaactcctgacctcaggtgatctgcccgcctcggcctcccaaagtgctgggattacaggcgtgagccaccatgcccggccagttgggcagttcttttgctggattcacctgggtttattcatgtgtctgcaaatagctagtggcttggctcggcctgggtgttccaagatggcttcatccagatgtatgggcctcagccgggactgctgcaatgatagtctcagctgaacttctctccatgtgttctttcatcttgtgcttcttcacatgaagatggaagtggtccaaaaagtcaagccccagtgtgtaagcacttatcctgcctctgctggcatcaactttcctaatatcctgttggcgaaaacaaggcagatgtccaagcccagtgccaacgtgggaggagaatgtatgaggttgtggatatctggaggtgtgatttttggggaaatagctgtaacaatttaccacattaaacattgttttagctacttccctttttctgatgctttgcctatcagtttaccttctgattataatttggttttccatgtaagtatgctgtcaagaaaataatgcaccaatcacacgcacttcaaatatttgctattgctgtgattgtgatagtaatttttttttttttgagacggtgtcttgctgtgtcgctcaggtggagtgcagtggctcgatctcggctcgctacagcttccgcctcccgggttcaaaggatcctcctgcctcagcgagtagctagaattacatgcacatcccacagtgcctggctattttttgtattgttagtagagatgggatttaccaagttggccaggctggtctcaggtgcctgacctcaagtgatccacccgcctccgcctcccaaagtggtgggattacaggcgtgagccaccatacctggcctgtgacagcaatttcttacaaaataataaattggctcatttcaaggacagaatgcctactgtatgagcttccagtatttttttttttttcgagacagagccttgctctgtcgcccaggctggagtgcagcggcatgatctcaactcactgcaacctctgcctcctgggttcaagtgattctcctgcctcagcctcccgataattgagattacaggcatgtgccaccatgcctggctaatttttgtatttttggtacagatggggtttcaccatgttggccaggctggtctcgaattcctgatctcaggtgatccgcctgcctcggcctccgaaagtgctgggatacaggagtgagccactgtgcctggctgagcttccagtattctttactagagtcttgtggtctgtggactcccttgctaagaatcactgtagtccttgtgatctgtctcaagcttataatggtgtatgtgaaaatgtaagaaaattactaatgaattatcttgaaatgttttctctgttttgccagatatgaacaatataaagccattggaaggggtaaaaattctggatctaacaaggtttgtattggtttatctacattttggtgattgggtttttccctttcctcaaaaacttttaattttttgaattataagaagagacttatatgcttatgttgaaattttagagaagaaaataagaaaagaaaaattgctgtaatatcatcattctatgagacaattagtgtagtatttatgccttttcccaatgtatatttatatataatcttaaaaaacaaaaattggaaccatattgaaattagttttacccatattttaaacacaatgttatatttttaatattttcctatgttattcaaaattcaacaaaaaagtgaaatagtaattaatatatcgatgtcacataattacttaatcatcctctaatctttcacgattataaattaggcttccttgtacacaaatgtttccctcagttttgatttcttcctcaggataaaattctagaaaaagaattataggggccaggcgcggtggctcacgcctgtaatcccagcactttgggaggctgaggcgggcggatcatgaggtcaggagatcgagaccatcctggctaacacggtgaaaccccgtctctactaaaaatacaaaaaaattagccaggcgtggtggtgggcacctgtagtcccatctactcgggaggctgaggcaggtgaatggcatgaacccaggaggtggagcttgcagtgagctgagatagtgccactgcactccagcctgggtgacagagcgagactccgtctccaaaaaaaaaaaaaagaaaaagaattataggatcaaaggggatatatatttttaaagctcctattacatatggccaaattacagttttaactgttttgattcttactaggattatatgagcgtgtctgtgttgacgggttgttggaaaataattaatataaacattttcaagatggtaattaatttatttatcatttttaacattgtagagtcctggcgggaccttttgctactatgaatttaggagatcttggagcagaagttataaaagtggagagaccaggtaaagctattactccctttaaaaaatagaaacaagctaataaatattttaaaataattctctaaatacccatgtttagtgtacctataagtgggataaggagagaattaaaatgaaatgattgtctttttcttctccatttcttgttttcctgtgaactaacactaatgatatctttttcactccttatgtgtgctaagtgctaaggctcaagccagtttcttctttgcacctgaaggcttttgttagaagctgaggctgggcacagtggttgacgcctgtaatcccagcactttgggaggccaaggagggcagatcacttgaggtcaggacttcgagaccagcctggccaacatggtgaaacctcttctctactaaaaatacaaaaaaaagtagacaggcatggacctgtaattgcagctacttgggaggctgaggcaggagaatcacttgaacccgggaggtggaggttgctgtgagccaaggtcatgccactgcactccagcctaggcaacagagcaagactccgtttcaaaaaaaaaaaaaaaaatgaaaaaaaagggactgagatgcagcgtataacaactatgataatgacacctacagtgccggggcaaagttctcaatgctttgcctgggcttatttaatctttacaacaaccctatgggctgatgctattattcatagtttataaaggagaaaatggaggcacagagaagtaaagcaacttatttaggggcacacaggtaataaggaatatccagaccctcagccatgattctggccttccttagccccagcctagctttagcattgagactgagattacaatgggcctggccaccctccctcaccgtggaatcaagggaaggccaggagaaaggaggataaaagtgaagaaatagggtacagaagaaggagagaaggaaaaggaatcacagtccctcaaaaaacaacctaaggctgggcgtggtggcttacgcctgtaatcccagtactttgggaggccaaggcaggcggatcacctgaattcggcagttcgagaccagcctggccaacaaggtgaaaccctgtctccactaaaaatacaaaaatgagccaggcatggtggcagacacctgtggttccagctacttgggaggctgaggcagaagaatctcttaaacttgggaggtggaggtttcagtgagccgaggtcgtgccactgcactccagcctgggtgacagagtgagaccctgtctcaaaaacaaacaaacaaacaaacaaaaaacctcaaatactccaacctaagtcattcttttctattcctttttgtttttattttttagagacagcatttccctctgtcatccaggctggagtacagtggtgtgatcatagctcaccatagcctccaactactaggctcgagcagttctcctgcctcagcctcctgaatagctgggactacaggcatgtaccaccatgcccagctataataataaaaatttttttgtgtgtgtagagacagggtcttgctatgttgcttgggctggtcttgaactcctgtctcagcctttcagaatgttggaattacaggtgtgagctactactcctggccatttttttctattcccaataaaagaaacatttccccattttataattttaaaggttttgaagcgggaaacgcctaagcttagatcagttttttgcttttatgtttttcatctgacatctttcctgttctttcttcctcctttgttcaccaaatagatatattctgtgtacacatttctcacttttgtttggtatcatcttagcattttggtgtttagttcaagctgttattgataaagttgcttagaaaagcatcattgttggccgggcatggtggttcacgcctgtagtcccaacattttgggaggacgaggtgggcggatcgtttgagcccaggagttcaagaccagcctggccaagatggtgaaacccccttctctactaaaagtacaaaaattagtggggcatggtggcagatgcctgtaatctcaactacttggaaggctgaggcaggagaatctcttgaacctgggaggcggaggttgcagtgagtcgagaccatgccattgcaccccagcctgggcaacaagagccacactccatctcaaaaaggaacgtgtcattgttttgtgccctttctctccaataagcacttaaagggcacagtccatgttttttaatgtctgctatatcatcatataaacagcttgttttattttatttttttttgagacaggtctcactctgtcatccaggctggagtgccattgtgtgatcatggcttactgcggccttgacctcccgggctcaagcaatcctcctaccttagctggaaccatagttgtgcgcaactgtgcctggctaaattttttttgttttgtttgagatggagtctcactctgtgagccactgcacccggccttattaaattttttttttttttggtaaaaacagggtcttcctatgttgcccaggctggtcttgaactcctgggctcaaacgatccttcgacctcagcctcccaaagtgctgacattataggtgtgggtaagccaccacacatggcctatgcagcttgttttagaagttttcaaaaattagcattattatttatgtttcaagatctgatcctacgggtcttaaacagaatccccaaatcagtgagactggtatagtgctgaatagtgtgtatgtatctctaagacttacaagagaatgatttataattacatcaacttagtaattgaccataagtgatagccatataaagtagaatatctttttgtttgtttccttcttttttaaaaaattttaaattttattttgtctttacagaaagtagaatgtttgatctggaagattcaatttcttgttaagtagatattcttaagaggccaaagcagttagcagaagattctctgatgagcatggggaatattgtatattagtatattatattttattactttttattatccctgacagtcttaggcagtagaagtgcctggcaagtcctgctcccagagatgatgctttgtttattcagctaatgatgttcatcgcttttagtcattgttggatacatgcggaagaatgtttattttctagctcaacatttgttttttttctttaaagcttctaatttccatattgctatctgatttcaacactgcagcactacaaccattggttttcttgcattttccattcctagatagaacattcaatgtattaataatttctcttgctatttctgttggccaccagggtaacatttgtatttctattaattttataaattgttgttccctatatagtgaggcctatttcctctttgtactttttagtttccaccatggaaactaaaccacaacagatctttctttgtctaggcctttattatgtctcatcgccatacacttggtatcgggctttgttcctagcagggatttattgtcttcttttttttgagacagacttttcgctcttcttgcccaggctggagtgcaatggcacgatctcggctcactgcaacctctacctcccaggttcaaatgattctcctgcctcagcttcctgagtagttgggattacaggcatatgccatcacccccggctaatttttttatttttagtagagacggggtttcaccatgttgaccaggctggtctcaaactcctgacctcaggtgatccacacacctcggcctcccaaagtgctgggattacaggggcgagccaccacatctggcctattgtcctttttttgaccagttactatgactccctgtcttcacccttctgattaatacattttaatattcatattatatatttaattgttttgggtttttgagatagttattcaacacagatatgagaaaaagggattttcattaaaagcaacttggtggtattttcacatttcaatagaaaactagtttcattttatatccacttctacagttcctcaattacataaaatttggttgttgttttctttctttctttctctctttttcttccttccttccttccttccttccttcctttctttccttctttctttctctctctctccttcttttccttccttccttctctttcttttctcttttattccttcccctcccctccccttccctcctctcccctcccctcccctcccttctcccctttcctcctcttctcttctttttcttttcttttcacaggatcttgctctgtcccctaggctggagtgcagtggcgcactcctggctcagtgcagcattgacctcctgagctcaagtgatcctaccacctcagcgtcctaagtagctgggaatacaggcgtgtgctaccacacctggctaattttttcattgtttgtagagacagggtttcaccatgttgcctaggctgttctcaaactcctggcctcaagtgatccacccaccttggcctcccaaagtgttgggattaccagcatgagccaccggatctggcctggttgtagttttctgatttactattagatgagattatttttatttgtgtaaccaaagagcatattatatttatgtatactcttctttttgtagagttagccagtcagtgggtgtatctgtgtgcctgcagggccaggcagggaacctaagtgaggaaagtgagcagggaagtgagcaaggatgcagctgaaatttcagcattgtctccactaggggacacgaggccagggctgttggtcttttgttcactgctgtgtctgctctgcacagagcagtgtctgtgacatagttggtgctcattaaatatttgttgaatgaatgagtgtgtcaaaaggtcatctaagaaaggcagtgtgaatttttaaagatttccagattttgaaatcatggcagctagttaaaaattttaagaattgtgcaggtcacgtatgtttattgcggcactgttcacaatagcaaagacttggaaccaacccaaatgtccaacaatgatagactggattaagaaaatgtggcacatatacaccatggaatactatgcagccataaaaaatgatgagttcatgtccttcgtagggacatggatgaagctggaaaccatcattctcagcaaactatcacaaggacaaaaaaccaaacactgcatgttctcactcataggtgggaattgaacaatgagaacacatggacacaggaaggggaatatcacacaccggggcctgtcgtggggtgtggggagtggggagggatagcattaggagatatacctaatgttaaatgatgagttaatgggtgcagcacaccaacatggcttatgtatacatatgtaacaaacctgcacgttgtgcacatgtaccctaaaacttaaagtataataataaaaaaaaaaagaattgtgtgggtcaaataaaacatgtctcccaagctgcaggtttttccagtttatgtcctttaaccatacatttcctgtcatgtgccatggacacagagccttctgaaaccccagttagatcaggaaagcctgtaggcctccagtttagactcctgacattatctccacctgagatatgagtgcaaatatctaaaataaactactagcctggtgcagtgggatcactttgggaggcctaggcggctgggtcacttgaagtcaggattgaggtcaggagttcggaactagcccggccaatattgtgaaaccctgtctctactaaaaataaaaaattagtcgggcatggtggtgcacgcctgtaatctcagttactatggaggctgatgcaggagatgtcattggtttatctccagttagaactaatgcttcttggctgggtgcggtggctcatacctgtaatcccagcactttgggaggctgaggcgggtggatcatttgaagtcaggagtttgagatgagcctgaccaatatggtgaaaccctgtctctactaaaaatacaaaaattagccgggcatgttggcgggtacctgtaatcccagctagttttagcaattgatggtacagtgaaattatagttctagaagttggtagtactatttttatttttattttcaaggtcacttagaaactgctttaaatggatgggcgcggtggctcacgcctgtaatcccagcactttgggaagctgaagcgggtggatcacctgaggtcaggagtttgagaccagcctggccaacatggtgaaatcctgtctctactaaaaatacaaaaattagccaggtatggtggtgcacacctgtaatcccagctactcaggtggctgaggcaggagaattacccgaacccaggaggtagaggttgcagtgagcagagatcgttcctctgcactccagcctgggcaacagagcaagactccatctcccaaaaaaaaaaaaaaaaaaaaacaaaccccaaagattaatagctcatgttattattttcaggagctggtgatgatacacgaacttgggggccaccttttgttgggacagaaagtacatattatctcagtgttaaccgaaataaaaaagtaagaatatcatcccttttttgctttttgtgtgtaattctcttataatagcaaaactgttgatatcattgtggcttgtttttttcttccttaaaaaaattaagatgtaactaatatttcaaataaattaaaattctattcatttaccattcactaagtagaaataatggagctttttactactctttcttacctactaagtaacttagaacatttcataagaatttataatggaaataattttatgaaatagaaaaattatttgattccttacatttgttattattagggaataattgcctaacactcggtattatactttaaaaacatctcctatcatccttgttagcatattaatatatcctcatggtaaatagaatcagtaaagatgatttaaatatttcttcatgcataaaataaatttaagaggatgatctatgatatgaatggctttcttgtcagcaataagaagaactttcatggctgggcacggtggctcatgcctttaatcccagcactttgggtggctgaggcgggcggatcacgaggtcaggagatcgagaccatcctggccaatatggcgataccccgtctctactaaaaatacaaacattagctgggcgtggtggcgtgtgcctgtaatcccagctacttgggaggctgaggcatgtgaatcgcctgaacccgggaggcagaggttgcagtgagccaagattgcaccactgcactccagcctgggtgacagagcaagactccatctcaaaaagtaaaaaaagaaaaaaagaaaaacttttatgatagtattttaatacacatacttttttttttttttactttttattttagattcaggggatacatgtgcatgtttgttatgtgggtatattgcatagtggtggggattgggcttcttgtgttttggtcatcgaaataatatatatatatatattttttaatttttagagtattgctgttaatatcaaggatccaaaaggggtgaaaatcatcaaagaggtacagtatgatgtatagaaagcatcctaccacctaggttataattagggtttggaatatcagagcaaaagtgttttaaaactcaattttatgggtgatctgtacgtttgcaacaaataccttttaagtatttactttgatttgtatacttctttgtaagtgtgatgtgctttaaattttttgtatattgtgtatcattatggtgctagctactattgactgagcaccaactctgcagcaaatcctgggcttgggcactttgctcacattatctcctctaatcctcagattttaccttgtaaatgaagtattgaaatctcatttacataaaagggaattgagtttcctggtgcctaagtgatgctccaagattccctagctagtatggggaaaagctgacatttggatctgggtcacatcactggaaagtccaagctttctctaacccttactcagatgaccaatatatccagacctgatctgagcatctttcttagaggagctggaaggcacagtggttaaattaagggtggatacctttgcatgggatttgaatcctgccttctgtgcttactggctatatgacctcagacaggttacataacttctttgtgtctcagtttcttcattagtaaactggaggtaataatagtacctactttctttctttttttagaaacagtctcgctttgttgcccaggctggagggcagtggcatgatctcagctcactgcaacctccacctcctgggttcaagcaattctcttgcctcagcctctggagtagctgggattacaggtgtgcactagcacacctggctaatttttgtaattttagtagcaatggggtttcaccatgttggccaggctggttcgaactccttacttcaagtgatctgcctaccttggcctccaaagtgctgggatttacaggtgtgagccaccgcgcccagcccaatagtacctactctctagggttgttgttagaattgagttagtctttgtaaaatgtgtagacgagtgcttgccacatagtcagcactcatgaggtattagctattattattcctatgttcctgatgttggattcatcatgtgggataaaccttgtttgccatccttgttaaggtttaagttgaatctaatggttgtatagtattcttctgtattcaggggattggttctactagaacctccacatataccaaaatctgtgcatactcaagtcctgcagtcggccctgtggaacctgcttatacaaaaaattgcctgtcagggtacatgggttttgcatccagtgaatactgcattttccatccacgtttggttgaaaagaatccacctaggggtggacttgcacagttcaaacccctgttgttcaagggccaactgtacttagggctatttggttagagaaccaagtctcaaacttatttatttagagacagagtcttgccgtgtcacccaggctggagtgcagtggcgcgatctcggctcactgcaacctttgcctcctggtttcaagcaattctcctgtctcagcctgcggagtagctgagtccacaggtatgtgccaccatgcccggctaatttttatatttttagtagagatggggtttcaccatattggtcagtctagtctcaaactcctaacctcaggtgatccacccgcctcggcctctcaaagtgctgggattacaggcgtgagctaccgcgcctggcctcaaactttattttttaccaaaacattaacttagcttcaattgctctgctgctgctttatgttctctgtctcagttattgaaagataatctttaattattaagatcagaatcagggaccattctttttagttctgctggatcaatgcagccaatttagaattttcgttaactagatatattttgaacccaaaacttgaaaatcatcctgatcttaccactctttcttcccatatctttcctgtagcataacttaggtttgtttctgtttttcttttgaaacttggtttgatttttctaaattgttttcctggcctcaagcaatccgcatgcctcagccacccaaaatgctgggattacaggtgggaaccaccatggccagccaattgcttttagatagttattacaattaataagttatgtatcttactatctaaaggaaaaattattttttctctagtctttcatatttctggtacagatttctcttctggccttaagagtagcaaaaaatgccaggcatggtggctcacgcctgtaatcccagcactttgggacgccgaggtgggcggatcatgaggttaggacttcgagaccagcctggccaacatggtgaaaccctgtctctactagaaatgcaaaaattagctgggcgtgttggtgcgtgcctgtagtcccagctacttgggaggctgaggcaggagaattgcttgaacccgacaggcggaggttgcagtgagccgatattgcaccattgcactccagcctgggtgacacagtgagattccatctcaaaaaaaaaaaaaaaaaaaaaaaggattagcaaaaataacccctctccatttaggccttggtggctatgattgctaatacaatgagtttagtttatagaaacagttccaaagtattacacaaggcaatcagctggatacatgagagcttcaaaaagtatgactcctttgtcagctaggctaaccaaaaacaggttgtgtaaaaactgaaactctgcctagaaaacctatatgaaacttagtattattgtggcaatatgatttgataacttctgatcatgtcttatccaatatttcagacaattttctatgttaattagttgacagttacaatatcattattatgggcatgtgttatggtcagcagagcaatgcatgagttttattttcctataacattttgttatgaaaaattaaaacattcagaaaagttgaaagaataatgaactctcatttatcctatgcctagatgaaacaaaaatattagaattttgctatatagcatgcagtttattttctttctttcttttttttttttttttttgaggtggagttttgctcttgtctcccaggctagggtacaatggtgcgatctcggctcactccaacctctgccttctgggttcaagcaattctcctgtctcagcctcccgagtagctgggacttcaggtgcccaccaccatgcctggctaatttttgtaatttttagtagagacggggtttcaccgtgtaggtcaggctggtcctgaactcctgacctcaggtaatctacctgcctcagcctcccaaagagctgggattgcaggtatgagctactgtgcctggccagcctgcagtttattttctttagtgcttgtagtagtgtttttttttttttttttgagacagtctcactctgttgcccaggctggagtgcagtagtgagaatttggctcactgcagcctccaccttctgggctcaagcagtcctccttcttcaacctcctgtgtagctgggactacaggcatgtgccaccatgcctggctaatttttaaattttttgtagagacgaagccttggtatgttgcccaggcatgtcttgaactcctgacctcaagtgatctatccccccgactcagcctcacaaagtgttgggattacaggtgtgagctatttggcctggccaattactgtgttttttttttttttttttttttgagatggagtctcactctgttgccccaggctggagtgcagcagcacgatcttggctcactgcacctccacctcctgggttcaagtgattctcctgcctcagcctcctgagtagctgagactacaggcacgtgccaccacgtccagctaatttttgtagtttttgtagagacagggtttcgccatattggccaggctggtctcgaactcctgaccttaagtgatctgcctacctaggccccccaaagtgctgggatttacaggtgtgagccactatgcccggccaatttatttaaaaaagattttttttttttttgaagcaggttctcactctgtcacccaggctggagtgcagtggcatgatctcagctcactgtgacctctgtctcccaggttcaagtgattcttgtgtctcagcctcccgagtagctgggattacaggcatgtgccaccacacctggctcatttttttgtaattttagtagagacagggttttaccatgttggccaggctggtcttgaactcctgacctcaaatgatctgcccccctcggcctcccaaagtgctgggactataggtgtgagtcactgcacctggccctttaaaaacatttttaaaagtatgtagtcacaattgaaattttgggaaaaaaatttcccaattttttgtaaaatttctgtaaaattaaggtttacaatgctgcattgtcctctaattcccgtaacagcggtctgggcatcacaatctggattttgttcctgacagttcctggtttactgggctatagtttagtagcctgaagaaaaaaaactccagtggttcttaaatacatttaaaactctttgggaagaatgcatctgaaaggtgtgaaaacatttcagaatcctgcttaagtgcgttaagtgcatgttataatgaggaatattacataataatagggatgctgagtagtagagatattgtgtttaggtctgtttttggagacaaggtctaacagtctcccaggctggagtgcagtggcgccatcacggctcattgcagcctcaatttaccggctcaagtgatcctcccacctgagcctcccgagcagctgggaccataggtatgcaccaccgtgtctggctaatttttgtagagatgggattttgccatgttgcccaggctggtcttgaactcctgatcttgaactcctgggctcaagcagtccacctgccttggcctcccaaagtgctgagattagaggagtgaacaaccacacctggcctatttagttttcttgtaaaggtttaaaaaatgtttttcattgatttagtgtacttacattctaatttttctacctaatcttttgagaatctatttggacagaccatgtagtctagatatttattacatttgaaggatgcagaatccattctgcatgtacttacatgtacttacaaaaactttaatagccattattttactgacagtaatgctttaagtagttgactagaacttctatgtttatctaatttgcttcatcagtcctgtgatttttctgagctattacaaagggagaatcaattgtgtaaagttaaaattctatcatgtggggatttgttgagtggaagtctgactcatgttcacctcttccatcagcttgcagctgtttgtgatgtgtttgtggaaaactatgtccctggcaaactgtctgcaatgggcctgggatatgaagatatagacgagattgctcctcacatcatctattgttccatcacaggtatttcaaccccacacccttgtcagttaaaaggttttccagtttctgtgttttcttattgctataagaaaccttttgctggctttttttttttttggaagttattctgttttcctttttccaaggccgtttaggttgctgaacttacttttttcttttttcttttttttttttttttttgagacagagtctcgctctgttgccaggctggagtgtagtggcgcgatctcggcttactgcaacctctgactccctggttcaagcgattcttctgccttagcctcctgagtagctgggattaccaggcacgcgccaccacgcccagctaatttttgtatttttagtagagacggggtttcaccatgttggccaggatggtctcaatctcctgacctcgtgatctgctctcttcagtctcccaaagtgctgggattacaggcgtgagccaccacgtccggccttggctgctgaacattattaagaaacattaacctaaatgaatattttcataaatttattggctatttgtatttcttctttgaattgtctgcctatagttttgctaagttttatgttgatgttttgcaaatgtttacaaaatactgttattaactcttgcataggtgaatttacagttgaaaacaattcttttttttttttttttttttttttgagacagagtctcactctgtcgcccagcctggagtttagtggcatgatctcggctcactgcaccctctgcccctaggttcaaaggattctcctgcctcagcctcctgagtgtctggggttacaggtgcctaccaccatgcctggctgatttttgtatttttagtagagacagtgtttcaccatgttggcgaggctggtctctaaatcctgacctcaagtgatccacccaccttggtctcccaaagtgctgggattagaggcatgagccatcactcctggcctacagttgaaatgttaattggctttaagataataacataggaacccaaggtatcccttcaatatattcagaagcactaagccaaaggaaggaaaagagtggcataaagtcttccaattgttcagcccttgccagtgaacctcttatatatgcatgtatgtgtatgtttaggctaaagggaaaaagtcacggtgttacttagttttctatataagtacttaactcttaattagggatgcgatagagaaaagtgactcataacataaaatgttatattaatagtttgcatcagaaaaattcataatattttaagtttttactcagtcatccaccaaatatttactgcaagcctttgatcttccaggcaatagactcagattctggaatacaggagtgataaaaatccatctgtgctctctagagcatttatatgctaggttagggtgatagatagtaaataaataagcacttttgtttttgtttttggtaattgagtctggtagttggcaagggggtggggtgaggataagttatttcaaactggtaggtgagagaatgccctacccatatggtgacatttgagtagagacctgcatggggtaaaggagtgaaccacatagctactggcgaagagggttttaggcaggacaacaccaagtgcactagccaccacacccgggtaattttttgtgtgtttttcatagagatgaggttttgccatgttggccaggctggtcttgaactccttgccttatgtgattgtgttattctattcccagttccacctgtaatgcagagcacatgataggggttccacagccaacagcagtttcttttttggaggcagtgtatctctctgttcctcaggttggagtgctttggtgcaatctcagctcactgcaacctccacctcctaggttcaggtgagtctcctgcctcagccacccgagtagatgggattacgggcatgtaccaccttgcctggctaatttttgtatttttagtagagatggggtttcaccatgttggccagactggtcttgaactcctgacctcaagtgatccacccacatcagcctcccaaagtgttgggattacacgtgtgagccactgtgcccggccctgatgattaacttttgtactgaatgacaggttctgtacttggtagatgattcttggccactagatctcactttttaaaatgtgctgttttatagatccataatcatattttcatttttctgtctaaacaatatttatatgtgtgacagagtgagggagagatttttttccatcagaatcttgtaatctaatggaaatgttgaggtttaaaatcttaatataggtaaattatcttctgaattatcatattaccataaaaacgctgcatagccaacaaatgcaaaatgctatatgacaataagcatttatttctgtttcccatgtctgtggttggctgggattcagttgatacagactggttaggtttggctccaagttgtgcattgggggactggtatgctctgcatgtctgttatcctccttggatcagtggccaccaaatgcatctcccctcatagggaaaggtggagtgcaagagaacaagcccattttcaccagtgtgtttaaagcctgtgctcccaatgcatctgctaacaaatggagtatttgtcaaagcaagtcacatggccaagtccaataccaatgggtggtgaaatacattctgtttcagagggaggaactacaaagtcacatggcatagggtgtgggtttcgagcaggatgacaattgagaataataatacattttatcacatcatcgagtcaaaaaaaatgttagtctacttgggaagcccacacttcctaatgattcacatttataactaactggttagggtcaaaagttcttctgggccttgacttaatgattggagagtctctaagttttcttacagttctcaaattctgtattaaaattttagtgtggtgaaatggcattggagatagattatataattcagtagttctcagacaaggaagaatggttctatcatgtgctttttagtgatattatggaggaatgagagggtgataggcagatatgtgtagtctgaaaacgtacctctcattattctataatctcctaattcccacctcctgacagttattagaataacatctatatactccgttctcctttatttcctgataatgaaacagatccagacctaaggtcacacagctatttaatagcagatgggtttaaaactcaggcttcttgtcttagtagtaagtgcctctatgctttccatacttagacatatcaataagtaatgacagattttgtaattaggtgacactgaacagtgctacttgagaataatatatttttgccattttctttcgcttgttaattttatttgcaatagtggaagtcatgaacaaatttattagtcagggagtctaaatttcaacagattcttctggaagccaaagtcattcatgagttgtgagtttgtgtgcatataaagcaaggttcatctctttttttaaaatttgattttcttggctgggcgtggtggctcatgcctgtaatcccagcactttgagaggccgaggcgggcggatcacctgaggtcaggagttcgagaccagcctgaccaacatgacaaaacccccgtctctactaaaaatacaaaaattagctgggtatggtggtgggtgactgtaatcccaacactttgagaggccaaggcgggcggatcacctgaggtcaggagttcaagaccagcctgaccaacatgacgaaaccccgtctctactaaaaatacaaaaattagctgggtatggtgggtgactataatcccagctacttggaaggatgaggcaggagaattgcatgaacctggaggcagaggttgcagtgagccgaaatcatgccattgcattccagcctgggtgacagagtgagactccacctcaaaaaaaaaaaaagtttgattttcttggtaatcagtgtgtctgtgtgtgtgtgttttttttttaataagactgattacatcagtctaaagttgcacatgttgtgattgagatcctagactttcctgatatttcccaatggtattgctctcttgtcagtgctgtccaagcccaaatagtttgttctcactcacatgttggccctattgctgatgagagtaatcttagaatggctgggagattgactttaatgcactctgacagttgtgtggttgaaattgcctcagtctatgaaatctggtctgcaggacaaaaatgctagagtgatcacaagggaggaaggacctgattatttttattagcatggtcctcttatcatttcagaggaagctgagtatgcacattagggggcagtgtttaaacagctattattcactaggaattatttttgtgaaaagggcagtgtttcctgtgtaccactgggtaggaagattctctgaaggacatatttatatttgtgaagtgaccactctatatttctctatacttttagaagtacaatggtatttcccctaacaatttaattttaagttgtaccttctttccctcgtatcttctgaacatgttattaattataaaaatttagcagtaggaatcctcgccactacattttaaaatgttatttctcctgttcttgttaatttcattactctttctttctggaaggataaacatttcattatattattgactagactgagtttgtagtgggaacactgtacatgtcatttaatgaagtttcttttttttttttttaaaggaagagggtttgaaaagtgccttttttatttttgtgaattcctcagggacatttccttaatctctatttatatagcattacatagagttaaaatcatacaaaatatatgtgtttaaaatatgaagacatacaaggtaatgaatagtacaaaattcaagagaatgattaaccctggggagtggggaggtaggatatgggacagggaagagagaaccacagaatttcaattatattcacaaaataaactgactggctggtacatgagtattcgtcattctgtattttatgatttaagtgagaataaaagattcagaaatgcccaaatagctcccctccttatttccttcctttcttccctttcctacccccaaacaactatttcttgatcttctgtatattcctggctgtgttgagtgctcagggcaaacaatgtagacattgtccttgcatttttaaggagctgacagcctaggtcagagacattctataaacaagttaaaacatataataaatacaacatgtattagcaaactatactattatgaaagaatgaaatagtactgtggtggagattaacagaggaggggttgcatgctgtaaatgggcttgtcagggaaggtttttttttgaggggggtaacatttaagagacctgaaggatgacaaggagccagccatgtaatgagcaaggggagaagtgattgaggcagagagaataccatgtgcaaaggctccgtggtaggaaagatctagacgcctttaaggatctaagagaaagccgaagtgtttggaacactaaaaactgagagcagtatgcttgaaaagatactgcagaggtgtgcaggggccatgacatgctaggatgggtctgagcagtggaggggtaggatcataatctttaaaagaagtaggatttttcagtagaatgcagattaaaaaaaaagaggtagaattcaattcctggttgactgacttcattataggcattggagattgaaatggggctcaggtttcacagagtagctataaagataattttttaaagattattaaaggccctcatagtgtttcagagtcaatagcagagaatggtgagcccaaatggatgaggcaaattatttagcaactgcattctacattcatatcacagcaacgggaatacaaaacaaaacactgctgcagttggattcttacggcatgagttagtctgtgtgtgtgtgttcttattttcggcatattcaccacataactatagctttaaaaaaagatagaataattagaataggatctgcaaatccatactgcaaattcatagatgttttgaaggtgagaaaagacattaagactagagagagggaaaataagaaaggaaggaagagggaatgaaggaaaaaggaaggagggaatgaagaaaggaagaagagaaggaagaataaaataagagaggcagagtggagtaaaatgggataacaatcagcaagattttttaaaaatttctaaagacagtagtctagttcatctggcgatgttcacactgcattaagtatcatttttagactgaataaataatcaatatggagatgatagtttaatagatgatattaaagggaaccctcatagtcaaaacaattgaaaactactggtctaaattatgagtgtctctgttgcaccctcttatatcaggaaatattttttcaccagagtttcaggatattgtggccatctgtccaactgtatagacagtgatctttagtgaaagtgtggtttgacatatttaccatttcatattaagctcattatttaaagaaataatgacaccatctctgcaggggaagagaaacttagcatataaatatagggtttcaaaacacagcccttggagctaaggactgagattatattttgtctgtagacatggactgattccagaaaatgactttatgcctttattttattccccaacagtataaccttttatctttaaatatttctttttacccatacacatataacagatgtgttacatgagttggacttactggagtaccaccagatgctttcttctctcccagcccacctctgcaaacctgcactgtccacttattctctttgctcatagatgaaatcccaggcaagtcctatagattttttttctcctcagttatttcttttcttttcttttgaaacagggtctggctctgttgcccagtctgtagtgcagtggtgcgatctcggctcactgcaacctctgcttcccaggctcaaatcatcctcctcctcagcctctcgagaagctgggactacaggtgcatgccaccacgcccggatagtttttgtatttttggtagagatggggtttcaccatgttgcccaggctggttttgaactcctgggctgaagtgatcttcctgcatcggcctcccaaagtgttgggattatagacgtgagccaccatgcctggcagttatttcgtttaaagtattaaaatgttcagtccagtctaatatcaaaacctcagactcttgtccagtttatgacgtctccttttccccaacttcaggctactttcttgggaatgtgaagaggatgtgtgtgtgtttgtattacaggtgcacatatgttgcatgtgtgtgtgtttgtattatgtatgcacatgcatgcatgtgtctgcatgtctatgtgtttcggaagagcctagtcagtttcttcattatccatcttttcctattgttagctgctatttgtggtttttttcagaatcaggccctcccagggaagggaagcaagttaaagggtgcaataagggtatgacttgactggtgtagttgtaacctgcagtggagccttctgtgtgcctgaagttctgtaggtggctctctttatggggagttttgtagtctcctcagagacctcagattgtagttctcccacttcagtccctgttttttgtggttgtctatacacagagtctatctgttatgatcaccttgtcctataggcagccctcatgggtagaattccttttcagataaactccttctgctttcctcatggtgaacttggcccatggggaaaaatcctccctcctccttggccattggcaggtgtacagtttattccgaactcttagctctgttgcttttagccgatgtagccataaccccttgcctttggtattctttcagacacatgccacaggtgcttaggtaattccaaattcccagaattcccaaattcccttagcttgtatcaaggtctctgacgcttttttggaagtctctcttgtgtggcttaagttaaggggaaaacagcttgctcctctcttatgacagaatgagatgcctagcatacaataacaactctttccaaggaaattcagctgaaggttttatttagcttttcaccttttctcacatatcctcaaatggatgataagctaatggcagcaaaactggtttcataatcttttagtgttatctgtgctagtgttctggcactaggacattttttgggggtttgaagcctcagatgaaactgagagaaggagtctctttgcaacattctttaaagcaaattttgctgaagaaatatgtttttcaggtagtaaggattaacattaagtcgagtgaacatgagatagctgtcttcaaagtttctaactatggaaatagaatatttatttaagccgggcacagtggctcatgcctgtaatcccagcactttgggaggccgaagtgggtagatcgcttgaggtcaggagtttgagacctgcctggctaacacggtgaaaccccgtctctattaaaaatacaaaaattagctgggtgtggtggtgcacgcctgtaatcccagctacttgggagactgaggcatgagaatcggttgaacctgggaggcggaagttgcagtgagctgagatcgcaccattgcactccagcctgggcatcagagtgagactccatctcagaaaaaaaaaaagaaagaaaaaaaagaatatctatttaataagataaacatattttggctaatgttgtagattttcaactatttaaacccaagtgaaaaggttaactttttctgtatatataatttaaaaatatattttcctgctataaaaaatcaattgaaaggtgatattgaattgttactgggtataagaaacattatgacagttttccttgtgaattttttttttttgagacaaagtctcacttagtcacctaggctggagtgcagtggcatgatcatagctcactacagctttgacttcccaggctcacgtgatcctcccgcttcagcctcccgtgtagctgggatcataggcatgcaccaccacaactggctaattttttgatttttttggtagagatgtggtctcactatgttgcccagactagtctcaaactcctggcctcaagtgatcctcctgccttggtcccctgaagtactgagattacaggcatgagccagccactgtgcccagcctacttgggaattttttttttttttttgatacggagtcttgctctgtcacccaggctggagtgcagtggcgcgatcttggctcactgcagcctccacctcccgggttcacgccattctcctgcctcagcctcccgagtagctgggactacaggtgcccgccaccatgcccgactaattttttctatttttagtagagacagggtttcactgtgttagccaggatggtctcgatctcctggcctcgtgatctgcccgcctcggcctcccaaagtgctgggattacaggcgtgagccactgcatccggcctgggaattctttatgaaactgtgggattaagaaaatcttggagccaggcacattaactcatgcctgtaataccagcactttgggaggccaagacaagaggattgcgtgagggtcagtagtttgagaccagccggcgtgacatagtgagacctcgtctctagaaaaaatttgaaaaaaaaaaaattagccaggcatgatgacacaagcctgtagttccagctactcaggaggtggaggtgggaggatcatttgagcccaggagtttgaggctgcagtgagctctgattgctgcagtgagctctgattgcaccactgcactccaacctgggtgacagagtgagaacttgtctcttaaaaataaaaagagaagggcccggtgcaatggctcatgcctgtaatcccagcactttgggaggctgaggcaggtggatcatctgaggtcaggagttcgagaccagcctggccaacatggcgaaaccccgtctctactaaaaatacaaaaattagccaggcgtggtggcgtgtgcctgtactcctagctactcggggaggctgaggcaggagaatcgcttgaacccaggaggtggaggttgcagtgagccgagattgcaccactgcactccagcctgggcgacagagcaagactctgtctcaacaaaacaacaaaacaaaaataaaaagggaaaaggaaaaaggaaaatgtattggattggaacatggatgaagtgatttcccattctgttaaaagtgacaaaattggccgggcgcggtggctcacgcctgtaatcccagcacgttgggaggccaaggtgggcagatcatctgaggtcaggagtttgagaccagcctggccaacatggtgaaaccccatctctactaaaaatacaaaattaaccgggcatggtggtgcatgcctgtaatgccaactccttgggaggctgaggcgggagaatcacttgaaccctggaggcggagattgcagtgagctgagatcatgccattgcactccagcctgggtgacagagcaaaacttcatctcaaaaaaaaaaaaaaaaaaaaagaaaagtgacaaaattgttcatcttagaagagctctgctgggtgtaattagggatatgcaagtaccctctcatgacacagctttgtacataaatgtatgtggtctacttcaattcccagatatttttatttttctgatactattgatttaaaaaagagaaacccaaaactttaacaggagattgagctgtttttctacatattctaaaattccagaagcaaagagatcgcctgggcctagaaatacagtataaatttagtatagatcattacccactaagaatcagttgatttcatctttggtctctaatttctgatatatggttagaatagtttccaatttaaagaatctcttggagactagggaccagtaaaaggaaaaagatgacaatactagttaatgtcacagcagtagttatttcaaaactttcacaaattgaatgttttatagatcgtgccagataaacatgccaggacttagccaccatccaaaaaccctgtcatcaaaactgaattgtttccccttatggtaataggcctgggaaataaatccataaatttaaagaagcaatgttagataagaaaaaaattttatacttaaaaggataaaaacatacatgtcagatagtgtttagatagcattcatctcgctaattattttttccattctttgcatgtttcttcaagctagcattagtgcaataccacaactttcagccttttatttgaacctcagtatatttaatcacaaaggttaaaagtatgtggagtaggtaatagtttgaacctggaaagatcagggattttgatggaataccagattgtggaatcagtgaaatccaacttgtaaagaatatattatgcacaaaggtttttcaagtgaaaaatatcaaagtttaagaaatttggcaaacgtacagttaagtttatatgagggattagttccaggaccttctgtggatgttcgaatctctgatatgataggcatagtgtttgcatataacttatgcacatcctcctgtattctttaaatcatctttaaattacttgtaatacctaatataaagtaaatgctgtgcaaatagttgttatacctattgtttaggaagtaatgacaagaaaagaaaatgtacatcttcagcacggatgcaagttttttcctaatattttcaatttgtggattggttgaatccatggatgtggaacccatggatacaaaaggcagattgtatttgattataagaaagactagtctggtcaggcacagtggctcatggctgtaatcccagcacttttggaggctgaggcaggaggattgcttgagcccaggggatagagaccagcctgggcaacatagtgagactctgactctataaaaaataaaaaaattagccaagtgtggtggtgcgcacctgtggtcccatctccttgggaggctgacatagaagattgcttgagcctgggaggttgagactgcagtgagctatgttgtgccactgcactccagcttgggtgacagagcaaagatctggctcaaaaaagaaaaaagaaagactagtctagcaagccaccaattaggaaatgggcaaaggacttgaatacacattgcttcaaagaagacatacaaatggccaataagcacatgaaaaatgctccacatcattagccattagggagatgcacaccaaaaccacaacgagatacctaccatctcgcccccattaagatggatactatcaaaaaaccgggaaacaacaagtattggtgaggatacagagaaattggtacccttgtgcactgttggtgggaatgtaaaatggttcagcccctatggaaaacagtatggacattcctcaaaaaaattaaacacagaagctgggcgtggtggttcacgcctgtaatcccagcactttgggaggccaaggtgggtgggtcactcgatgccagaagtttgagatcagcctggacaacatggtgaaatcctgtctctaccaaaaatacaaaaattagccaggcgtggtggcgggcacctgtaatcccagctgctctggaggctgaggcaggaggattgcttgaaacccagaggcagagactgcagtgagctgagattgtgccagagcaagactccatctcaaaaaaaaaaaattatacacagaattagcatatgattcagcaattttatttctaggtatataccaaaagaattgaaagcaggacctcgaaggattatttgtacacgcattttcatagcagcattattcacagtagctaaaacatcaaagcaacccaagtatccattgacaggtgaataaataagcaataatgatggaatattattcagccttaaaaaggcggggaattctgacacatgctgcaaggatgaaccttgaagacattttgttaagtgaaataagctagtcagaaaaggtcaagtactgtatgattctacttatatgagattcctagagcagtaaaattcatagagacaggaagtaaaatggtagttgctagaggttgggaggaaggagagactcgggagttagtgtttaatgggtatagggtttcagttttccaagatgaagaagttctggagatggatggtggtgatagttatgcaactatgtgaatatatttaatgccggtgcactgtacacttaaaaatggttaaaactaatttttttgttatgtatattttgccacaattttaaaaagtagagaaaaaaaggaaagaatagtctaaactataaggtattccatggaagaaattcagattactatgtcacaagtagtagaaaatgttttaatatgtcttggatcatggtctacaaatacaaataaatatttgacaactaggtattgaatatgtaaaatattctcttgttcaagaataaattgattcttttttttttttcttgctctgttgcccaggctggagtgcagtggtgcgatctcggctcactgcaacctccgcctcccgggttcaagcaattctcctgcctcaggctcctgagtagctgggactacaggtgcacaccgccatgtccggataattttttttattttagtagagacggggtttcaccgtgttgcccaggctggcctcgaactcctgagctcaggcaatccgcccgcctcagactcccaaagtgctaggattacaggcgtgagccactgcacccgactgattcttacatgtttaagttaaaagccctttattttaaggattttgtttttcttttcaatctgctgcaattagtacagtataggatacatacttgttatttgcttaataataaattttgaccaatatttcatgtttttatcctcaaaattctattccatacacatcttcagattcttactgctattcaccatattttgttattccattgtaaattgtcattcctaaaattgtctaagaaatactcagaggaatgagtgatgggagtttcagttggtgctttctggagagaagacttgtctaatagaatgaatagttataatcaggagagttctaggagagttgctgatgttacttcaaaataagaataaagggccggatgcggtggcgtgactcatgcctgtaatcccagcactttgggaggccgaggcaggaggatcacctgaggaggtcaggaattagagatcagcctggccaaatcccatctctactaaaaatacaaaaaattagccgagcgtggtggcacttgcctgtagtcccagacactcagaaggctaaggcaggagaactgcttgaaccgggaggtggaggttgcaggagcccagatctcgtcattgcactccagcctgggctgcagagcaagactacgtctcaaacaaaacaaaacaaacatgccgggcacggtggcacatgcctgtaatcccagcactttgggaggccaaggcggctgaatcacctgaggtccggagttcgagaccagcctgaccaacatggtgaaaacctgtctctactaaatacaaaaaattatccaggtgtggtggcgcatgcctgtaatcttagctatgtgggatgctgaggcaggataattgcttgaacccaggaggcggaggttacagtgagccgagatcgtgccactgcactccagcctgggtgacagagtgagactctatctcaaaacaaaacaaacaaacaaaagaataaagattttataattatttttaaaatttcaatccaagaaatgaaatattttggcccaagtttttctaggaaggcacatttcccctacatagttcatctagaaagttccatcatgtttcttacagctctccaaggaaagccaaatagtagtgtgggacaaatcttcaccttagttagatgcatccagaatctgacatgttctcttatcatcctcataccttgaattttctatttttcttttttttaaaaaatttaattttatttatttactttttgagacagagtcttgctctgtcacccaggctggagtgcagtggcatgctctcagctcactgcaacctcagcctcccgagtagctgggattacaggcatgtgccaccacgcccagctattttttttgtatttttagtagagacagagtttcaccatattggccaggctggtctcaaactcctgaccttgtgatctgcccactttggcctcccaaagtgctgggattacagatgtgagccaccacgcctggcctacttttctttctttaccataccttggtttttgcctgctatacaccctcagttgtgtttcaaacccaacatattgatacaatgattccattaagctgtatgtgcatatatatgtgtgtgtgtgtatatatatatgtgtatatatatatatattttgagacagtcttgttatatataaagttttggtgctgtataagaaatagcactcgaatataaaattttcttttcaattctcagcaaggcaagttatttatatatagaagggtgagcccttacagatggaacgatggtgagcgcacacctggataaggaaggggaaggggttcttattcctgacgcatgtggcccctgctactgtgtcgttcccctatttgctagggttagaccacacaggctaaactaattccgtttggctaatttaaagagaatgacagggtgagtgctttggcgggagtcagggcaaagcaggtagcagataattggaatgagttagggtggagcaggtgattggaaggtagggtggagcaggtgatcagaatgagtcagggtggtgtaggtaatccaaaaaggttgctttacgaggaagtttaaaagtagaaggcaaagaattgaacatactgacatattaattctttggaaagaaatttagaactcgtatctaacagtctgtcacccaggctggagggcagtggtgtgatctcggctcactgtaacctccacctcctgggttcaagcgattcttgtgcctgtctctcgagtagctggtattacaggcacctgccaccagccgagctaatttttgtatttttagtagagatggggtttcgccatattgcccagactgatctcaaactcttttattggttggttgattgatctgattgattgagactgagtcttgctctgttgcccaggctggagggcaatggcacgatcttggctcactgtgaccttcacctctggggttcaaatgattctcctgcctcagcctccctagtagctgggattacaggtgcccaccatcatgcctggctaatttttgtattttttagtagagacagagtttccctatgttggccaggctgatcttgaactcctggcctcaagtgatctccctgccttggcctccaaattgctgggattacaggcatgagccaccttgctggccttagacttgaattatttattacatacacgaggcatggagattattgaatataagctttttgatccatcattattaccaccttgagacctgtagtatctaagacaacaaaagctaacgtggaaggcacagaacactggacgtgtggcccagacacatctcagatgaagatggtggagagaaagcgggacaaggcccaggtggaatctgggcttgtgagtgacatgagtggagcttaatatgttttcttctcatgccccacctctcacaccaccacattcccagcatttctttggattctttgcagttcccaaatttacttatctagagcaggggcctggaagaattatttccattcttgggaatgtgggcacaagactcacattcttggcttttacatcatagtgcattttctatcctaagtatcctcagggcctagatttttgaagctcaaaagggaacaaataatgtaccttttttctctacatccttggtgttatccccacctttaggccatggataccaaatactctagatctggggcctgcagactttttctgtaaagtgccagagagtaattctgttttttttttaagacaggatctcactcttttgtccaggctggagtgtagtggcatgatcgcggctcactgcagccttgatcctctgggctcaagtgatccttccacctcggtctcccaagtttgtcaattctaaagagcctgggcaacatagtgagaccccatatctaaaaaaaaaaaagaaattagctgggaatagtggcacatgcctttagtcttatttatttgggaagctgaggcaagaggattgcttgtgccaggagtttgaggctgcagtgagctatgatcaagccactgtactgcagcctgggtgacagagcaagaccctgtctcaaaaaccaaaaaaaagatatatgccccaaatagtatggccacattatatataagagaaaaaatgataaaactataaggaggaacatgtaaattgatgattatagttcaatattttttttttgtttgtttgagatggagtcttgctctgtccgccaggctggaatgcagtggcgcgatctcagctcactgcaacctccgcctcctgggttaaagcgattctcctgcctcagcttcccgagtagctgggactacaggtttgtgccaccgcatccagctaatttttgtatttttagtacagacagggtttcaccatgttggccaggatggtctagatctcttgacctcgtgattcacccaccttggcctcccaaagtgctgggattacaggtgtgagccactatactcagcctatagttgaagattttaatgcgtctttctcagtgattgataagaaacaaaaatagtaactgtgaggtgatggtacattaattaacttgatgatggtaattatttcacaatgtatatgagaacgtcgtatcatatatcataaatgtaaataatttttgtcaattatacttcaacaaagccagaaaaaatttaaaactaaataaaatttttgaaggttttctttctataggtcaagattattaattatactatacaagtctttcatatttttaatgtttttttatgttgtcttatcaattatcttatcaattactgagaaagacgcgttaaaatctttattattcaaatttgaccaacttttccacttaatgtccttttctgtcccaggatccaatccagcatgtggtactgcatttaatgattatacctccttcgatttctccaacatgtaacagtttctcagtctttccttgtttttttgaccttgacagttgtcagagacttgtcagatattttgtagatgtccttcaaactgggtttgtctgatgttttcttaggaactgagttgatggcttttgggaagactattacagaggtgaagtacccttctcttttcatcatgtcagggactatctgatgtcaccatgacatcactgatgacgttaactttgatctcttcgttaggatggtatctgccaggtttctccactataaatttactacccttccttttccatgtgatattcttggaactcaagttcagcctcctctctgctgaaggggaatgaagcttcacctcctgaggaggtgtggagtatctctattatttgtaactgttctgaaagcaacatttgttccttctttcccagttgtttgtttattcaggtatttgtttatgtcagtattgacttatgtatatttgttttattcttcaagttgtagtccaatattattgttttttgttttgttgctaaaatttctcagctttggcaaagggttgctctttcaggttgacttttgtgtctttctgacatgcctctatcctttcaagattttcttttcttctctctcctccttttctccttcctcctccttgcatcagccctacaactcagtgcttgttttgataaattatctcatggaatcctcaagatagccttgcaaggtagatagatattattatctccatttttagattttgaaactgaagtcacacagtgcttggcatagtcagaccatgaactcagcggtttgaaccacactattatcaactgctaagctatgtactctctcctttttctgacaagttcgcattcaaagagagaggttagttgaggaggttcttactgatagagtttaaaattttcttataaccgttgccctgccttccagactcttctgtcactgagaattcaacaatgagcaaaacaaaaaaattactgtcctcaaggagtccttattgtagttggataatgatagcaatgactgaatatttattaaatgttagtcactgttcatcactttatatgtattacctgacataatatttataatatattacataatatttacagcagccccatggggtagcttcaattatcattttaaagtgagagaactgaggcacaaagaggttatgtcacttgtccaggattactctgccactaaactaagggttgtgattcgcacctctttgtgtgtcagaacttagggactgggagcagagagttgtagttgtggtgatgttctttatgagtggtattgtgggtctaaattgagattcagtgaaagtagaaattatgggctgggcatggtggctcatgcctgtaatccgagcactttgggaggcttgggggtgggggtcatgaggtcaggagttcgagaccagcctggacaatatggtgaaaccccatctctactaaaaatacaaaaattatctgggtgtggtggcatgtgcctgtagtcccagctactcaggaggctgagccaggagaatcacttgaacccgggaggcggaggttgcagtgagccgagaccacgccactgcactccagcctgggcaacagagtgagactctgtctcaaaaaaaaaaaaagaaagaaagtgtggataaagaggaaagagtatgtgtatatgtatagaggagagaatgcgtatgtctacatgagatcagtcacataggcattccctctatggagaatgagagaaataactgagaaagactcccagagtttatagcatggcagatacgttagggtctatcaaaattaaagatgtctccctttttctgggccacgttatactttgaacactttttttttgtttgtttgagacaaagtctcattctgttgctcaggatggagtgcagtggagcgattatgactcactgcagccttgagctcctgggctcaaacgatcttcctacctcggcctcccaagtagctgggactacaggcgcgtgccaccatgctcagataatttttgtattttattttatttttttgtagagacaggattttgccttgttgcctaggctggtcttgaactcctaggctcaagtggcccacccgccttggcctcccaaagtactgggattaataggtgtgaaccacccactctcctcttgaacattttaatcacagtaatgcagaactttgaggatactagcaaacaatggctagtgagtttcatatatcatttacttcttatcaaatacaattaatgttaagagcttaatattaagagattaggccgggcatggtggctcatgcctgtaatcccagcactttgggaggctgaggcgggtggatcacgaggtcaggagatcgaaaccatcctggctaacacggtgaaaccccgtcgctactaaaaatacaaaaaattagctgggcgaggtggcgggcgcctgtagtcccagctacttgggaggctgaggcaggagaatggtgtgaacccgggaggcggagcttgcagtgagccgagatcgcgccactgcactccagcctgggcgacacagcaagactccgtctcaaaaaaaaaaaaaattaagagattaagccattaagctaattaatattaagagattaaggtttggaacttctatggcatgaatggtttgggatttcgaaattgtttctctattggtaagtagaggtagatgaatatatcctgcagcccagaccttttagtaaatatttgagctattattaccttatatagaacagaaattattgatatgaaatgcaatttacttacagctctcatccacagagaaaggcttttttttttttttttaacttgttttgggaaataaaaggtgctttaaaaagaattttcttcattttgtcttggggcagattcacaaatagcttacaagaaagcaagatggggctgggcgtggtagctcacgcctgtaatcccagcactttgggaggctgaggcaggcggatcacctgaggtcaggagttcaagaccagcctggccaacatggtgaaaccccgtctctacaaaaatacaaaaattagctggcataatggcaggtgcctgtaatcctagctacttgggaggctgaggtgggagaatcccttgagcccgggaggaggaggttgtagtgagccaagatcgtgccactacattccggcctgggcgaagagcaagactccgtctcaaaaaaaaaaaaaaaaaaaaaaagaaagcatgataggacaaggctgcttaagcttgcttaagaagagtgttggccggacgcagtagctcacacatgtaatctcagcactttcggaagccaaggtgggtggatcacctgaggtcaggagttccagatcagcctggccaacatggtcaaaccccacctcttataaaaatacaaaaattagccaggtgtgatggtgcatgcctgtaatcccagctactcactttgggggctgagacaggagaatcgcttgaacctgggagggggaggttgcagtgagctgagagtgcgccattgcactccagcctaggtgacagtgagaaattccatctcgaaaaaaaaaaaaagaaaagtgttgtaatttattaataccctctccatataagaaagaataaaaatcattacaggcagtcaggatgttcagggcaagtgtaagtattttctttgtggtgttctttttactctgttcatttggatgctggcatttcccccccctcagtcttatattgaatggcaaattgtttatggagtctgtatctgaatttagcaagagtttgctgcactgaggtttctagtctgttgtcttaactgcctgatactgtgattaagctagggccacagataccatttgatgtttacccttctccgttgcccaccaacctgtcttgaattgattccagaattattattcttcttcttttttttaagacagggtctcactctgtcacccaggctggagtgtcatggcgccatctaagactggctgcgacctctgcctccgggactcaagtgatcctcccacctcagcttcccaagtggctcggactacaggctcgtgccactacaccaggctaatttttgtatttttttgtagagaaggggttttcccatgttgcccaggatggtcttgatctccaaacctcaagcaatctgccggctctggtctcccaaagtgctgggattacaggaatgagccaccgcgcctggccaacttcctgaattatcgttgtctccacacctgcttacagtgctgttcctcaggtatcaaagcatcccagcatgttgtgcctttctccccatcctcctctactttctcctctgttgtgtactggtaactcggaatctctgaatggctgtagaaacagaaaagtggatgggactgatggaaaacccaaatttgggtttcagaaagctatctgttgtttgacatgcagtctagaattaatgactataccaggttacccttggaacatcttgcatttgtgggcagaaacatttggctacttgccacggggttatcctgaaaaaagatgggcttgaaaaactgtcactagtgtcacttgaattggtcatccatggttggggagttccattccaagaggataatttacacaatttaaaataaagggggccaggtgtggtggctcacacctgtaatcctagcgctttgggaggccaaagcaggtggaatccttgaggtcaggagtttgagatcatcctggctaacatggtgaaaccctgtctctactaaaaatacaaaaattatctgggcatggtggtgtgcacctgtaatcccagtttttgggaggctgaggcaggagaatcatttgaacctgggaggcagaggctgccgtgagctgacactgtgccacagtgctccagcctgggtgacagagctagactttgtctcaaaacaaaacaaaaaaagtaagtagaataaagggagtgaaagcaagaggtgctcttcaaaattattatttgctcattggagaaatacacgcatgtactactttgtagtagtaacattttcattaaacaatagaagcctggctcccacttctccaaatgaagtggggggaaaagtgttgtaactggatgtcatgatcagtcatctcaattataaaagttaggtgacattgtctctttgggacgttgttgagcggtgaagccagctgggcttctgggtcgggtgaggacttggagaacttttcggtttagctaaaggattgtaaatgcaccaatcagcgctctgtgtctagctaaaggtttgtaaacacaccaatcagcactcagtaaaaacgcaccaatcagtgctctgtgtctagctaattgggtggggacctgaataacttttctgtctagctagaggattgtaaacacaccaatcagcgctctgtgtctagctaaaggtttgtaaatgcaccaatcagcactctgtaaaaacgcaccaatcagcattctgtgtctagccaaaggtttgtaaacgcaccaatcagcactctgtaaaaatggaccagtcagcactgtctaaaatggaccaatcagcactctgtaaaatggaccaatcagcagcatgtgggtggggccaaataagggaataaaagctggccacccgagccagtggcggaaatccgttggggtccccttccaagttgtgccagctacattctttcgctccttgcaataagtcttgctactactcactctttgggtccgcactacctttatgagctgtaacactcaccacgaaggtctgcagcttcactcctgaagccagcgagaccatgaacccacctggaggaacgaacaactctggacgcgccacctttatgagctataacactcatggccaaggtctgcagcttccctcctgaagtcagcgagaccaggatcccaccagaaggaagaaactccagacatgtccgaatatcagaaggaacaaactccagacacaccatctttaagaactgtaacactcaccgcgagggtccgcagcttaattcttgaagtcagtgagaccaagaacccaccaattccggacacatttaaatacaaattagtaagtagaataaagggagtgaaagcaagaggtgctcttcaaaattattatttgctctttggagaagaaatacacacatgtactactttgtagtaataacatttttattaaacaatagaagcctggctcccacttttccaaatgaaggggggagaaagtgttgtaattggatgtcatgatcagtcatctcaattgtaaaagttaggtgacactgtctctttgggacgttgtgaccaggccatgtgaatggagattgttgaaggataggcctctctccaccaggtatgccaatcacgggggtaggggtggtgactcttctgtttggatgtttaaaatgtacattaaacagacaaaataaaatacgaattaaaaaaaactaaaaaacttcttatcaccaaagggcagaaaaaaacctgtgtaaataataccttaaattaaaattaagaaattaaaaggcaacttgttaataaaaaatcttttgatccaacttttttccttagaattctaaatcttatgttcactcccttataacaagtgtcaattaattagaagctggtaaaaataaggaagtttaccctaattgctggctggttttttttagtataggagtatgtgaagaaataaagcttttttcccaactcgtttgaaggcagtttgtactgttttgatttgagaataggagacacatgatttatcatttaagaatgtgcttcttaatcctttgcaccaatgatgctttttgtggaaattctctactaaacatggtatgtgatgttatcttccctttaaagtgtttttccccactttggccagttttgatgtttatcatctctctctataagtgttttgatgagatgttgagaggcgtactggtatggctgtctgctgccatgctgacccagaagtaggaactacttttgctgcattccctgatattccatctggctgtaatgatattcccagagtgttccagatatttatatgcatctgatacaaagttattatgaattaaaaacataaacctggctttgcaacttgactatatcaggaggaaagttgttattggttcatgactttttgataagtctgttaccaagtatttttaagccattaggccttcaagccaagtgatagtccctgagtaacaatggaggaagcaccacttaatctaagttgcatgtggaggtgacaaaatctgagagcttttaatgattcatccaccccatttaacttagggctacaaggaaaagtactctttatgcagtagtttctcatgtaaaagtgggaaattttctcttcttggcacaattccacaaatacatagatatatcccttttcaagaaaataatgccagcctcaccttaagtttcttattttaggattgcaaattctaaattatttatttttggagtagccacagaaaaattctgaacctgggctgactcacccaacacaaaatgttttgacataatcttccttgtttggattgttgaaagagaatgtaaatttatcttactattagcttagctcaaacaatgaggaagttaagttaattggtatgaagccacattttctgtattgaagatgcattcacaggacaatttttgttttagctttttagagtcagtgtctttatcatcagtggagatacaaaatatatgaatatggttagatcccgtctaatttgtcatgcacttagcaaaaacaacccgaaaaacaaaaggcagttttcatttatattcatttggaaaatacacttttaaattattattatcagaaatctaattatagcctgtaatcccagcactttgggaggccgaggcaggcagatcacctgaggttaggagttcaagaccagcctggccaacatagtgaaacccagtctctactaaaaatacaaaaattagccgggcatggtggtgcattcctgtaatcgcagctacttgggagggtgaggcacaagactcgcttgaacctgggaggaggaggcttcagtgagccaaggtcatgccactgcactccagcttgggtgacagagcgagaccctgtctcaaaaaaaaaaaaaaatctaattataaaataaatcatttgtttacattatctattttttaatttagaaagctgttattggtcttttttttttttttttggcagagtttcactctgtcgcccaggctggagtacagtggcatgaacttggctcactgcaagctccgcctcccgggttcaagtgatacttgtgcctcaacctcccgagtagctgggattacaggcgtgtgccaccacgcctggctaatttttgtatttttagtagagatggggtttcactatgttggccaggctggtcttgaactcctgacctcaggtaatctgccctcctcagcctcccaaagtgctgggattataggcctgaaccactgcatttgaccccataatcatttttaattaataaatgttaattgaatgttcatagtttcagaaggaacagttctataaaatttataatctgatggcaaaagaaaggggcttcactgggacctctgtaagatttttgtttcctgaacttggtggatgagtggattaatatatgattcacgcctgagatatttagagactaagagaatgtctggagggctgtggtttgggatgccactgcagttctgcaaatatttcctgtggattggggtaagagagagaagaacattgtgtgctggttttagagcctgcgcaagcaggcagaaggaagctggtggtgtgctgatggtgactggggctgaggagggacttagaagtgaccaggtggaaaacagatagattcatcagtgtaaaaaagtctggtggtgagatatccccagtgatggagtggaagagatcttggaagaacctattacaatgccccgtgttacaataagtaggctttaaatccccgtcaatcacagggagcagcaatgctgggtcaccagagtaatacaattaaataagaccttcactactgcccatacctcttctctgtgttctccagtccctcaaccttatatccagccatggaggcattagaagctaggttttgcaaaatgaggtgctacatggatttgcttctgtcactattgaacactgatggtttttcttaagtgcttctgatttttttggaagtactgtctgcacatggtagctactcagatatttctcaaatcaaaattagtggaatagactgggcgcggtgtaatcccagcactttgagaggctgagatgggcagataacctgaggtcaggagttcaagaccagcctggctaacatggcgaaactctatctttactaaaaatacaaaaattagctgggtgtggtgtgtgtgcctgtagtccctgctactcgagaggctgaggcaggagaattgcttgaactcaggaggtggaggctcctccatgcccagctaatttttgtatttttagtagagatggggtttcactgtgttgaccaggatggtctcgatctcttgaccttgtgatccacctgcctaagcctccctaagtgctgtgattacaggcataagctaccatgcctggccagcactttcttaatttttggcacaagcacacatcttattttattttatttttcatttctttccttccttccttccttccttccttccttccttccttccttccttccttccttccatccatccacccatccttccatttctttctttctttttgaggtagtctttctccgttgcacaggctggagtgcagtggcatgatctcggctcaccgcaacctccgcctcctgtgttcaagcgattctcctggcttagcctcccaagtagctggggctacaggtgcccaccaccatgcctggctaatttttgtatttttaatagagatggggtttcaccatattggtcagatgggtctcgaattcctgacctcaagtgatccacccgccttggcctcccaaagtgctgggattacaggtgtaagccactgcacccagcctgtttttatttcttgccccagttgtggaatcaactgtttatccaagaagccctgattccattgagtgacgaagggtatttaaaaccaagatctgagaactagatgtgcttataactgcaaactttttaaaccacccattagatagttattctataaatgatcattttcaccagggccaccacatgttttacatgccattacatgctctttctcctgatttcatattcttttctgctctgggatttggagccactgtgtatgtttgcctatttaggaagcattgcttgccctgaagtctgcacttttgaaaagactttaattgctctcactttgggcagttcaaaggttactggattttatttactatcttatttacttgagttacttttattctgttctttcatttatctctattaaataaagatgtagactgtacttaattgtgttttcctcttggcgatgaaacaaggctaaaaggtgattcttgttaatttgttactcatttgggttatccatttatctggatttgatttgagatgttgtttagtcttggtttgtaaagagatctgtactgaacatttctgtgttctttgcctaaaatgtcctttcacaggctgacgtagtgctgctatttggagtgtgggaatccagctatagggaattggttttatgtgagagtctggctgagtttttattttcttttctactcaaagattatgttttatattcctgtcatttgaaatttgattttgctcctgacaatgaaaaatatttaacaatggtaattctcttcattctttaatgattctatgatccatctgccagaatgtgagctgcattcattttgtaaaaaatgtttgatctttgggacatagatctaattgctgacatagtttctttagattccatgaaaatatatttaaattcttaatatgaagacaaattttgcgatttattttcatttagtctgtgtggtttataatagttttttttccctccttatttgaataagtcttctaggatttaggataatctgtgcgtgtgtgtgtgtgtgtgtgtgtgtgtgtgcatgcatgtgtataagtgtgtgtatgtgattgtgagtttagttaaggtcacttttagcaagatgcattgacatggtcatcagagcctttgaaattgtagactccatttgaataatagttttgaagactttttttccttaaaaaacagtgtatgttgtaggcaagatagtatcttgattcctagctcctgtcaatcttctgaaaacatttattttgatagtttatttgaaaaacatcataggcatgcatggaatactgtaaatggcaaaaatatgcaccagtcaggtgaaaagtgtttattaaattcccgctatactactgtttcctgtgtcccagtgttccagctattcagatcagaccggacctcttttcatctgtatggatgttgatgttccaagtagggaggaattgtgactctgccttttgtgttggcctgaatttggggagtgctcctcctgtggggccgcaatcattctgaattgttccaggaaagctgtctataggggcatccacactgcattcccatgggagaagccccagctgtgtctgcagtggggtaccatgagggaacaagacctttcggtatcacagaggctgcctgcctgttggggtagaaggtgctgtctagttgaggaaaatgaaacgtatgcatatgaaacaattgccagacaaaacatacctttatatattagcgttcccaagttggatatagtaaaacaaagtgggaattctgtaataaagacagataccagtgtaaacatttttctttttttgttcagtatgcttttgctgcatcacaggatactgcttaacttaccaatttatttacctttggtgactagggacatatgcttcttagtattacatttcagaagttttagatgctgtgtaattaatcagccagttttgctgcctttctgtggtagagattgaggggtccaacttcaaaggttattgatgtagtaaaccatattaatcagatttttggtctttgaataatatatgatttttttttttttttttgaggtggggagtcttactctgtcgcccaggctgtagtacagtggcatgatcttggctcactgcaacctctgcctgccgggtataagcgattctcctgcctcaccctccaagtagctgggattacaggtgcatgccaccacgctcagctagtttttgtatttttagtagacacggggtttcaccatgttggccaggctggtcttgaactcctgacctcaattaatccgcctgcctcagcctcccaaattgctgggattacaggtgtgagccactgtgcctggctaagatcgatgaattgttgatactcatggaagtattttgtaaaatattactcatagtaatgagtgtttacagtttagtaattatagaatcatagaaagtagctgtgtatctttgggtaaggcacttagtctttcagaacctcaattttctcaataataattaaactaggacaataacatttactttgtatagttcttgtgagacttaaatgagatgacacatatgaagcaccaacacagtccctagaacacagaagtactctgtacatgttgactattattattataaccctaaattactgctattagttgaccttatggagtctttgggttatatgttaatttagattggctagcaggtatattgggaggtctcttgctgtattgaaatttacataaatcttattggaatcctgctgaggttggttttggaatcttgcatgtaggaaagtaactatctgtaggttggagatgctgtatctgtaccataagggcaaaagagaaaaggaaataaagcaaaatgaggtagaactgtgtgaatctacattattatacacatggcagaaggacaaactactaaattgacagtatggttgtggcaaaacttctttccaagtaatgggaaggtttttcaccaggtcaatagaaaaaatgaagtgaaatgctgtaagactgtaaaactttggaccatttgctgaccacgtctcatttagttctcacaagggtactgtctgcaaaacaaaaaaacacaaagaccaaaaacgctagagaactggctcttggttttgtttctgaattaactctataaaagtaaaaagtggctaagaagaatcttcagaatagaaaactaactcttttttttttttttcaggtgtagggtatccaaagtggaaaactgaaatgagcattagttctagttttgttattgcttggcttcatgactttggccaagtcacttaacctatctggtcttcagtttttttcatctgtaaagtaagaatttttgccccagacccatttagctctaaaattccttggtgtacttttagacatacaaaatgaaatttgcatatcacttaaaaatttattggcccagcgtggtggctcacgcttgcagtgagctgaggtcctgccattgcactccagcctgggcaacaaaagcaaaacttttgtctcaaacaaacaaacaaaaaatttattaaataaaaagttaattattaataattaaataaaaactaaataatttttttaacatcttattgtggaaaaatttaaagtcacctaaagtagagagaatagtttaatagatctttttttttttttttttttttgagacagagtcttgctctgtctcccaggctggagtgcagtggcgctgtatcggctcactgcaaccatcacctcctgggttcaagtgattctcctgcctcagcctcccaagtagctgagactacaggcacccgccaccacgcctggctaatttttttgtattttcagtagggatgggatttcaccatgttggccaggctggtctggaactcctgacctcaagtgatccacccccgcttggcctcccaaagtgcggggattacagatgtgagccaccacacctggccagtataatagaccttgagatcttaagatcccagcccaataatgataattcatggccaatcttactttggtgatgggatcacaactcactgcagcctccttgaccccttgggttcaagaaatcccctcacttcagcctccccagtagctaggactacatgtgtgtgccaccacatctggctaatttttaaatttttttgtagagatggggtcctgggctcaagagatcctcttgccttggcttcccaatgtcaactttattttataaaaaaatttttaattgatatataatagttgtatacgtctcaattattttaaagcaaacctcagatttcatcatttcatttctaaatatttcgggatatatctagtaggaaaggactctttttttaacacatgaacatccaggccaggtgctgtggctcacgtctgtaatctcagcactttcggaggccaatgccattatcacacataagtaaaaataatcataattcctttattttatttatttgttatttatttatttatatatttatttatttatttatttttgagatggagtttcgcttttgttgcccaggctggagtgcaatggcaccatctcggctcactgcaatctccgcctcctgggttcaagcgattctcctgcctcagcctcccaaatagctgggattacaggcatgcgctaccatgcctggctaattttgtatttttagtagagatggggtttcaccatgttggtcagtctgttttggaagtcctgacctcaagtgatccatcccgcctccacctcccaaggtgctgggattacaggtgtgagccactgcacctggtctttctttctttccttttttgtcattattccttaatatcattaaatatacagttgtttttcagatttttcccaattctctctctcttttgtttagttggtaatttgaattgggatccgaataaagtaatcatagtagttgagttatatatttcttaagactttaaatttatagttccttctcagtcttttttcttgaaatttgtttaaaaaaccagttaatttattctgttgtgttttttgattttgctgaattcctgtgatgttaatttttttttgttctttataaactgatctataacttgttcaggtttgtgtgtgtgtgtgtgtgtttttgttgttttgtttttttggccaaaaatacttcatagaaggtggtgtgcagttccactaagaggcatataatggctgggcattactttctctgtgatgttggcaggcattgatgatgatttcccagatctgtgaatttattaggaattacaaaatgtgctattctagttctatcattccttcttcatatattagttgggaaacttttgtaaggggactctttctctgatcagttatttgattaccctgaggtataggcaggagagatgcacattccctttatttaccaattgccataataatgaattttcccctaggctttaccagtgatggctattttttttttgtaatatcattatgaacccacaatattgagcatatttgatgtgcttcaatttattgcaattattatccttcttgatgctcacattctcaggccagtaaaggcctttccgggttggcttctgcgtctttttgacatgaccaataatttttgatagcttccttgatttctggtaaaacaagatattccaggaacattttgtacctttcctgccccatcctggaatcagccatttcttcaaggactgttagttcctcttagtgggaagtggtatttacatactactgtctgatagtaggaatctcagtgatactgggttagtctttgattctaggcctttttagtggatggataagaaaataaatattaaaaaagaatatgcgctgggtgcggtggctcacgcctgtaatcccagcagtttgggaggccaaggcgggtggatcacctgaggtcaggaattcaagaccagcctggccaacatggtgaaaccctgtctctactaaaaatacaaacattaaccgggcatggtggcatgcgcctatagtcccagctactcgggagactgaggcaggagaatggcttcaacccagcaggtggaggttgcagtgagccgagattgcttcactgaactccagtctgggcaatagagtgagaccctgtctcaaaaaaaaaaaagtcctggtgcggtggcttacacctgtaatctcagcactttgggaggctgaggcaagtggatcacgaggtcaggagatatcaagaccatcctggccaacatggtgaaacctcatctctactaaaaatacaaaaattagctgggcttggtggttgcgtgcctgtagtcccagctactcgggaggctgaggcaggagaatcacttgaacctgggagttggaagctgcagtgagccgagatcgtgcaactgcactccagcctggtcacagatcaagactctgtctcaaaaaaaaaaaaaaaaaaagcatcaggagtttatacctcctatcattttaattcagaaacatcctacactagaaaatgagtagagaaataaacagaatccaggtatgtatgtacattttgaagaattacattacttactatgaaacattttattgcattttattctcctttgaggtaaacagtctattgttggagtttctgtagttgcttagaatattaatcttaaccttctagctaataacaatggtattacttttaaatatacactgtttttgaactcattaccaggataggtcttagtcctctttgaaacctgcttctttcttgtctctagtaacctatcattgaccaggtctgtatcttaaagagtgctaggtttgagctgtccttgaactgacaaacaatggagatgaggatcacaagtgaaatggcatgtatagaggcccagaggaattaaagagtttgcatgtctgaagaacggctattctaagtatgcatgtcacgtggtggccagagataagatataggtagtgagtgggggctaggtcacaaacaattcagtatgtcatgctaaggaactgttatttttatcctacaggcaatttcgtaagaatttcaataaggaaatgtcttgattagaattacaaattcgaaaggcttttgtagccacatgaagaataaactgagacaggggaagtggtaagcaggctatcgcaggacatgagaggctggatggatttgggaattacttggcaggtcaaataattaggaattagtgatctattggatataggcaggaagtaaaagaatagagtccaggatggcccttaggtttccttcagtttgaattagtgaatgtagaaggagcagtctgggttggtggcatatgaatgtgacttaagtgggataacttcttcttaggggttgtcagcttgcattcccttggactttctggtggagatgtccatacatgcataaatatatataaacatctttttatttaaggacccagacttgggttcaaatctaagctctgttacttcctatttgtgtgaccttgagtaggttagttaacctttccatgtctcagttatagttgtaaaaaggggataattcatagagttgttatatgaattaaacaaataattgacaaaagtctaacagagtgtctaatacacaataacttgataaatgttgtcattgttattctagatacgggaatttccagtatcttgtttagaagggatgagattcattagagagatgagaatgagaagagagaggaccaaatatggactgttggggaatgccaacagttgaacctcagaaactcagttgccaggagtcctctaccctcaataggttatttcagacatcactggagggagcagaggtttatctctgtcctatagccggttgtaacaagtgttgtttttattcccagacttatatattcacattcactcatttattaaacatgcttttgctaagttactggtagacgtaattctaggtgctaaagatattgcagagaacagtcaccttggtcacaggcctcagggtactaacattctagaggagagagatatccatcaaaaatataaaagtatccactagtgataagtactttagagagaatgaaaatatcataaaatgctagagaattcctaggagtctatgttagattgggtggtagagaaagcttctctgaggaggatgtagtagcaagccatgtgaagattggagagaaatacatcctaggttgtgcaaaggccccaccttgggaataagctgtggagaacactaaaaacaatatcagggcccaagatagggcattgggaaaacagacgagctgaggccaaagagtaggtagtaaccaagccatgtggggccctctaagccaggataaagagtggaggtttattttaagtgacttggaaagcccttaaaaagctttaggcaggaaagtagtgtactgatttaccttttcaaaaggtcactgtatggttgagcgtggtggcttatgcctgtaatcctattactttgggaagctgaggtgggaggattgcttgagcccaggagttgaagactagtctggacaacaaagcaacaccacatctctacaaacaattttaaaaattagctggatgtggtggtgcatgcctgtggtcacagttacttgggaggctgaggcaggtggattgcttcaacccaggagtttgaggcttcagtgagctaagatcacaccactaccctccagcctgggtaatagaacaagatcctgtctcaatcaatcaatcagtcaatcactgtgatcacaagagtcaaaaatgaggtagggagagcagaaacaggtggctaatggaatagtctagatgagagatactttattttgttctcttttttccttttattatcaagtgaaagcctcatcctgagtctcttggttgcttggaagcctcaaagctgtccttgaacagatccctgtcgggagagttgttttgataattgaggttctccaggcctagagcagtgatgacctactgaaggtcgttaacctgactcttaacccagggcaacaggggttaatgagtggggttctaagagtatgagcatgtattcaattactttcttctgaggagagttcatagcttcttaccagtttgtcaaagggacctgtgacctccaaaagtataaccattaacaagacagtgtgttgagcactgatgggagagagggaaaacacaaagtcagacataattaagaagaaaaatggggtaggcaggccagatcatatggcactcagggaaaatattaagagataataaatcttttccccttagcttcctccctgtacgtttttaccaacgtctagaaattcacgttttgctttcagtgtccataaatgccacaagatggcgaggttgctccttaaaatgaatgtgaattaccaagtggaagagagggagaaagagaaagaaaatgtgtgttgggtattcctctctgattttccataacttccctgatttttcttagctctttacttgaatataaagtagaatcgatatgcatacatttttcctctttaatttagattttaatcatagttgtttttggaattgtaaagctaaaaataaaatttaaaggaactatctggatcccaggcttaacattttttctacctcttcattaaattattaatgaataatttcattctgcacatcaccaacagagtaatcttagtaaaataccattttgatgttcattctctgctttaaaattttatttatttattctcataaaatttattcatagtactggtagtcagtatttaaatagttacaagtataaggtgaaaatgtggaataatttttgactcctattatggaatatatatgtttattattattattattattatttttgagatggagtcttgccctgtcgcccaggctggagtgcaatggcacgatctcagctcactgcaagctctgcctcccgggttcaagcaattctcctgcctcagcctcccaagtagctgggattacaggcatgcgccaccatgcctggctaattttttgtatctttagtagagacagggttacaccatgttggacaggcttgtcttgagctcctgacctagtgatccacccaccccggcctcccaaagtgctgggattacaggcgagagccacgtttattattattattgtcagcttcttcgctattatgaacaagtgcaagattccacgtacaaaatatcttaatttttatggtttattaaacaacataatttaaatgcttagatgtctattgtcatcatttgacatacctcagggtagttttctttttgttattctcaacattttgtagaaaaggtaagctaatatattatttatacattgattaatgcatctttagtaattatgtatatttagctcttgatataaaattcattttgcttgtgttatctaatcaaattaaatcctcataagaaatctatgagataaatgtgaatattgccattttacagatgaagacattgaggcttaggaagattgaatgaattgtcaaagatttaatagttggcagaactataatttgaatccagattttttttaatcctaaaactcccctttttccctatactttactgcttccaatgagagcaactattccttttctctttaatagaaatacttagaagttgtaatttaaagtaattaggatatttgtgtctctcccttgttctaagctgaacaaaaagagaatttttcctgcaggcctttatttagaagagtccttttagagttgcactgatggtgagggacctgggtttgtcccatttgagggatttgggctcctggccagaagcacctgattttccgaacctagagttaactgaaacttaatttcttttgttgacttcctgctgagataacaggtggttcacagtgcacaggccttcctgccgatggtggcagcttctttctgttcctggagacttgttttgtgctggggactaccagtggtttgaaaaccattgctttgaaggctggaatcccgggccagggtgccctctacagcagcacactacctgccctggaactcattctctaaaacttggcgttatttctgcacagagaatgttggcttatagtttatttctctttatttgcttcatatcccatttttgttcttctaaagactgagaaagtaatagttaagaatttatacattttgttattgatattgggagataaaactgtaatttacctgaatcaagacgtttgggtttttcagtatggttttatgtggccgggcgtggtagctcatgcccaatctcagcacttcgggagactgaggctggtggatcacttgagctcagaagttcaaaaccagcctgggcaacatagtgaaatcccatccctacccaaaatgcaaaaattagctgggtgtagtggtgtgtgcctgtagtcccagctactggggaggctgaggggggagaattgctggaacacagtcagtcgaggttgcggtgagccccgacggtgccactgcgctccggtctgggtgacagagtgagacccagtttcaaaaaaaagaaaaaagaaaaaaaaaagaaaaagataatggttttattttttcttcatgtaacagttctaattgaaagataggcatagtggaaataaaattgaccatgaataattattgaagttgaccgatgggtttattatatattctatctatttttatttgaaattttccaagataaaacataagcagagacatgttttaacacctttttttaatcatcaataattataatcttgaattattttaattccttcatattaagtgataattttatctgtggagtttgttttacatactcttatttgtgacaaagatcatttctggtggcgaatgcatctgggtagattaattggtgattatcactcacttttgtggttttatttatttactttttatagattgtttttgaaaaaaatttttgttatttttattttttgagacagactctcactctattgcccaggctggagtgcagtggcatgaacttggctcactgcaacctccacctcctgggttcaagcgattctcctgtcttagcctcccaagtagctggactacgggcatgcaccaccacgcctggctaatttttgtaatttcagtagagacggggtttcaccatgttggccaggctggtttcaaactcctgacctcaagtgatctgcctgcattgatctctcaaagtgctgggattataggcgtgagccaccgcatccagccaaaaaattatttttatataaaatatttttgcactcattcattccttcaataaatgttattgaacactgttctagaggctggggatacagcagtgaaccaaacagaaaaacattctggagtatacactttagtagggaggagacaaaataaatctaacaaataatggtattgtgtttctattgtgataagtgctgtggcaacatatataatgagggtgctcttttacaaaaggttgagggagagtcttccaggtggctggagaaacaaggcttgcaggcaaccctttcatggccttcctaaagcagcatatgcagggaatatcagcaagtagctgatgtgtatggaaagctcttcattgggtcactctgcttgatatgaaggatttggagacaaatttatgtagcttctgatacaacctttatttatttttatttttgttattattttttgaggcagagtctttctctgttgcccaggctgcagtgcggtggtgcaatctcggctcactgtaacctctgcctcccgggttcaagcagttctcctgcctcagcctccccagtagctgggattacaggcgcctaccaccacacccagctaatttttgtgtttttagtagagacggggtttcactgtgttggccaggctggtcttgaactcttgaccgcaggtgatcctcccgcctcccaaagtcctgggattataggcgtgagccaccacgcctggcctgatacaacttttatgatgtagcaataagcatcaggactgaggggagtagaagaaaatctttcctgtgttctgttgattctttctgatggcaaaaaaaaaaaaaaaaatttgacaccttctctaccttctctttgtaatcttaaaaatcacttagttgatgttattgtttatttatgtccaaatcttaaaatcatttaggttttctttgtttacttgagaaaatacataaatagaactcagggagatattgttctgcttaactttgtatattagcttaactttgtatattactgtgtacaaagcaagggtagcaaatacctgttggagtcagggaagtacttgaaacccggctgaggcatatggaagtagagtggtggaccctgtggcaaatcagaggatttatgccctatgtagaggggagaggcaatactcgactctaattgattattgcatgtgagaatgtgggcctggttttgaattatttcctttttttttgttttaaagggagtctccctgcattgtccaggctggagtgcagtggtgcaatctcagctcaatgcaacctccacctcctggttcaagtgattcttgtgcctcagccttcccagtggctgggattataggcatgcaccaccacacctggctaatttttgtatttttagtagagatggggtttcaccatgttggccaggcttgtcttgaactcgtgacctcaagtgatccgcccacctcagcctcccaaagtgctaggattacaggcgtgagccaccgcacccggcctgagtttttttttaagaatagccagggtaggccaggcgcggtggctcatgcctgtaatcctagcattttgggaggctgaggcaggtggatcacttcacatcaggagtttgagaccagcctggccaacatggcgaaaccttgtctttactgaaaatacaaaaattagctgggtgtgatggtgcacgcctgttatcctagctactcgggaggctgaggaaggagaatcacttgaacctgggaggtggaggttgcagtgagccgagatcgaaccactacactccaccctgctcgacgggaacgagactccatctcaaaaaaaaatgagtagccggggtcgagcactataatgaattcttactgccttcttcaaggaatggtatagatctaatagtctcgaaatgctgcaggatttctggatacaaatgtttctaacacactatattgtacagtggttttagcacaccctgtgtggtgctgaatatgtttatttttgttgttttagggtatggtcagacaggtccaatttctcagcgagctggttatgatgctgttgcctcggctgtttctggtctgatgcacatcacagggcctgaggtaggtatccttccttagaatattcataatttcttcccttacatattccaaaaggattttactctgcactaacccataggattaaatgagttgttaggttggggcaaaagtaattgctgtttttgccattgaaattaataattttagaaagaaaccagggaaagtgaatgcttatgaaagtaaaacaggaagtgttcattacaaatgtattgagtctaaacatcaatttggccacatggaaaagagcaatgtttttagcaagaagccatagatcagatggtgaacacactttccacatttattatgttattcaagcttaatataggcacctttgtgtgatttaggaatattccctctttgaaataaaacagttgactagactagaccacggatgtccatttctactagagtgccttcatctgccatgtgtacatagcagagggtctatttttccttttggaaaaatataggtagttatgtatttgaaaatttgttgcttaaagcctccctcaggtttaaatgtatctaatttgtcatgtgccttagattctgacagtgaaataattatttgattttataataattcctctccattgatagtggtttgggaagttcctaacaagtatttagatggccaaaatgtggttggttagattaaaaaaaaggctctcggggaaagcaatatgaatgacgttaaacaaagtgaaaaaaagtgtgaaagcctagtaaataaaaatgctaaaacacacccatttcaaaacaaactagattgatggccttaaaaaacttgtttcagtgggtgttcattctccaaatcacttcttctagttaattcttcaggaaatattgcttgctgtagtgttggaataaactgagacagagtgacctcaagtcttttgcagtcttccttttatttaattttacttattaattaattaattattttcctttgcctctattttctcatgatgagatttactttttattaatttcaaagcaactgttggggttttaatttctggaaatacaaagttattgtactttcatcttcgtttcattttcacaagtcttagaaaaaaatgtgtgtggcctttgcttttttttttttttttaagtcagagtcttgctctgtcgcccaggctagagtgcagtggcgtgatctcagctcactgcagcctctgcctcctaagttcaaaggattctcctgcctcagcctcccgagtagctgagattacaggtgccagctaccatgaccagctaatttttgtatttttagtagagacatggtttcaccgtcttgaccaggctggtcttgaactccttactttgtgatccaatcccagtgctaggattacaggcatgagccaccacatctagcctgttttgttttatttgagacagggtctccaggctggagtgcagcctccgtggcacactgcagcctcctgggctcaatagattctccaacctcagcctccaacatagcttggactacaggtgtgtggcaccaaacctgactaatttttaaattttttgtagagatggtgtcccattatgttgctcaggcttgtcttgaactcctggactcacgacatcttggcctcctaacgtgatgggattacaggcatgagctgctgtaccctgctggccttcccttaaaatattcaagagcaccagttttctttccatccattgagagaatagagcatggacatttctctcattgctcaattccataggctctcatgtggccaagacattctttattgtgaatggttttatttaagggtgttgaactcaattaggaatatgtgaaaagatctgggatttaaaaatttctatattcaaatggtaaaatgaattaaatgaaaaactgttgagctgggggattactgtagttcctttagtacattgcactgtggtctaacagggataaccacacagtatatgctcaaccttataatttctcagtcaataacagcttttatctcttgtgttaccctactcaggtgatttttgttctaggtgagcaaataacatttattgagtgcttggtatgtgccaaacattgctttatatactttccatgtattacattaagtaagcttaactctcacactgtatttctttcacatggacacatctttcattccttaattaagttacacatcaacctagtaagtagttaccgcatctgtttcctactgtacggtgggaatggtggtaggcgctggagattaagcaggcaacaggacaggcacagtccttatcttcctatagctgttaagtagggaaaacaaacattagcagaaaatatttattacatgcaaataaaaagaactgcgaagaagagtacagggtgctatgaacatatataaataacagtgtgcctcaggccattattatgcttctaaagatctccataaagtgtggtttgacagctaaagataaaagctgattgaaaagaatcaggccagcttggcacagtggctcatgcttgtaatcccagcactttgggaggccaaggtgggcgggtcacctgagttcgggagttcgagaccagcctgatcaacatggagaaaccccatctgtactaaaaatacaaaattagccagatgtggtgttgcattcctgtaatcccagctactctggaggctgaggcaggagaatcacttgaacctgggaggcagggattgcagtgagctgagatggcgccattgcactccagcctgggtgacaagagcgaaactccatctccaaaaaaaaaaagaaaagaatcagaagaatcaggccatgctgggagtcccccttaagagagttgttttcccttatcttatcagcaatatattaacaattccctaagcctctcagcagagattgtacgggaaagcacttctgaaagccttggctaatatttttaaccagccagtgcacacacactattgccaattatatccattgcatatgaacttttctgtaactgcacagccatgtatctgtgctgtagcataactccatgttgtcagatgagtgattggaactcaggcttctctgacatcaggaggcttctccacatcaccctacgcggtggagcccaagtttatcagggttgtcggtcagggaaggcatctctgagggcatatatttagggtgggatcctgttaagcattagccgattagcattagagagtaatgcatggtattgcatgtcatctagatgctggagagtctggtagttttgaagagccaaaagaagggcagtgtcactggattattgtgaactaataaggaagtggggccaaatgtggttggggaggtaaggaacagtggctgaacttattgcttgtggatttattaccttacttaatagtttgatgagaaaatacattattatatgcaaatatatttttagtgataatctcatatatttctctcttgaaatcgagtgatattccaaatatatagactagtgttataatgaaaaaactcaaagtgcaactttttttcctatagtgttataataatgtcatttttattcaaaactgggcatatctaaatgtatagtatagggactgggcatggtggctcacgcctgtaatcccagcacgttgggaggctgaggcgggcggatcacttaaggtcaggagttcaagaccagcctggccaacatggtgaaaccccgtctctactaaaaatacaaaaattagctgggcatcgtggcacatgcatgtaatcccagccacccggaaggctgaagcaagagaattggttgaacccgggaggtggaggttacagtggcccaagattgcaccactgccctccagcctgggtgtgaaagagagactctgtctcaaaaaaaaaaaaaaaaggaaaaagtatactgtagggaaaattttatgaaagaagtctttatggcctggcgttgtggctcatgcctgtaattccagcactttgggaggccgaggcaggcagatcatgaggtcaagagatcgagaccatcctggccaacatgctgaaaccccgtctctactaaaaatacagaaattagctgggcgtggtggtgtgcatctgtagtcccagctacttgggaggctgaggcaggagaatcgcttgaacccaggatgcagaggttgcagtgagctgagatcacgccactgtactccagcctggcgacagaccaagactctgtctccaaaaaaaaaaaaaaaaccgtctttatcatgtgattttgggtaaactaattactgttgacctttactaaatctaaaatccagccttttacgtatgctgtggtgttgtcagattagattatatttgattacggacaaagagagaatctattttgaattcctacactatgccagacagatgatagacattttacatatgtattttgatcctcacattggtacttccaggtatgttttgacaaactctttttttttcttttcttttttttttttcagatagagtcctcactcttgtcacccaggctggagtgcagtggcacaatctcggctcactgcagcctccacctcctgggttcaagtgattctcctgccttagcctccccagtagctgggattataggcatgtgccaccatgcctggctaattttttttgtatttttagtagagacggggtttcaccatgttgagtggtcttgaactcctgacctcaagtgattcgcccacttcggcctcccaaagtgctgggattacaggtgtgagccaccatgccgagcctcgtattgacacattctataactgaagcttagaggcttacataacttgatatgtaaagtactaaagcccaactttgaatccaggttttctttacttctgtagcctgtactctttccactccccatgatacctgcagaatgatcctgatgtctgttgtatttgcaccttgcttctgcatgctgcttgatatttgttacgatgtagtaaatagtccatttgaaagagtgggagagcactcaaagagtttggggttctggctctaattcactgctgtctgttcactgactgcctaaaatgggcctcagtaagatgtaagcctcataggaaagaccgtggtccttgatttggtcactactttatgcatagaacaggcccttagtaaacaattatgttgagtaaatgagtaaatgaatatctggtactgtgctatgtggcatatatatatatatatatatatatatttttttttttttttttttttttttttttttgagacaaggtctcactctgttgcccaggctggtgtaatcatggctcacagcagcctcaacatcccggggctcaggtggtcctccccactcagcctcctgagtagctgggaccaaaggcacatgcaaccatgcctgcatccatctctctctctctctatcatctgtttatctatctatcatctttttttaatgcatacagaatttgaagagattgggaatgaaatcaaagtatgagagattctggaaagtaaatgactcagacatatgtgatatgtgttctgagtaataattcaactgtaaatattggcacagttaaacatcaagaagaattatactgagcaatcaaatgaacaaagacgtattgaccatatgtgtaatgttgtattaggtaccataataagttactctgtaaggaattttttccttccctagattagatgtatatgcatggaaaaatgagaaaataaaaataacagaaaactgaataaaattagtggtatgttatgttgcagataatacatcagattggaaggtaaagcatctttaattttcttcttgaggattaacaacattggaaaactcatgagttggatgatcctagaggcttggggcttgggagtgtgtgtctgtctgtgtgtgtttgtgtgtgtgtatgtctatatatgtgatgttgacaacgaaggcagttctttgcaagcagctgagagtggcagatgtatgagggcaagttgatatggtggcagttgttagatgtttctgtgagaacttccatggtagggatagccaagaattcaactctgtgtcctagtttccagtgcaataaatgctcctcacaatttaaaaaaacttaataacatcttcagaatctatttatggcttacactgaatctgttggagagaagtttttattgtaacttgatgatgtataggcagagtgcggtggctcacgcctataattccagcactttgggaggctgaggtgggtgggtcacttcaggttaggagttcgagaccagcctagccaacatggtgaagccctgtctctactaaaaatacaaaagttagctgagtgtggtggcaggtgcctgtaatcccaggtacttgggaggctgaggcaagagaatcacttgaacctgggaggtggaggttgctgtgagcccagattgcgccactgcactccagcctgggtgactgagcgagactctgtctcaaaacaaaacaaaattaaaaaatatatataaagtataaatgtggttcagggtaggactttaaggaagcggtgggacttgagatgcatggtgcctggaaagatagatagaatgtggatggattaagacattcctagacattcccaggggagatcacacagtggaaaacaaatgcagagaagcaggaaggaatcaggcggtcttagggaaaacaataggccagtcacagaggcgctgagagttaaggtttcaggacataaggggaaggttgctttaggccttactttggcaagtcttcaaggtcaagtaaagaagttgggaggttgtttgctcaaagtgaagttcagaagatgtttcagaaggggagtgatatgatgaaagctgtgcttcgtaagagtagtttggcccaagtgtgcaggatggattaaatcaagtttacaagcattgttccttagatatttatctcctcctttaaaaactaagaaaacacaaaattacacaaggagaaattgctcttacattgctgtcaaaaggcaccgtattattcttagtttttattttatttatttttcgaagaggtaatacattcacataatactaaatccataagatacataagtaggtggaccgtataattcatcatacaaaccaggacagttttgagagagagagagagcaggaaggtcctctgtatgattacgttgggacataaactgggtctttttccttgagtgtctaacggtccacaatataaatctcctttcctctgtgcccatcccaccttattctcttcctcagatgaaatccatcttagcagttcttttttgtatctttccagagatattctattcaaaaccaagcaaaatagtcttcctctttaaacttttttttttgttgttgttgagacagagtcttgctctgttgcccaggctggagtgcagtggcatgatctcggctcactgcaaccttcgcctcccagattcaagcaattctcctgcctcagcctcctaagtagctggcattacaggcacctgccaccatgcccggctaatttttttttgtatttttagtagagatggggtttcaccgtgttggccaggctggtttcaaactcctgacctcaagtgatccgcctgctttggcctctcaaagtgctaggattacaggtgtgagccaccgcacctggccatgaacttttttttttattttaaatttttataggtacgtagtagacatatatatatatatatttttttttttttttatttttttatttttttatttttttgagatggagtctcgctctgtcacccaggctggagtgcagcggcatgatctcggctcactgcaagccctgcctcccgggttcatgccattctcctgtctcagcctcccgagtagctgggactacaggggcccaccaccacgcccggctaattttttgtatttttagtagagacagggtttcactgtgttagccagatggtctcgatctcctgacctcgtgatccgcctgcctcggcctcccaaagtgctgggattacaggcgtgagccactgtgcccggcatagtagatatatatttatggggcatgtaagattttttgatagaggcatacagtatataataatcacatcaggataaatggggtatccatcacctcaagcatttatcatttctttgcattacaaacattacaagtcttgctctgttgcccaggctggagtgcagtggtgcgattatggctcactgcagtctgggctgaatcgatcctcccatgtcagcctcctgaatagctggaactacaagcacatgccatcacgctcagctaatttttgtagtttttgtagagatggggtctctccatgatgcccaggctgggttcgattattattatttttttaaatatagacaccttggatagacactactcagtttaagatacagcatatttccatcactccagaaagtttctttttctattcccaagcaatactacctcctccagagataaccactatttttgacttctgatactatatgctagcttaacttctttaagtagaaccatatagcatgttctttttttttttttctttgagatggagtcttgctttgtcatccaggatagagtgtagtggtgcaaccttggctcactgcaacatccgtctccagggttcaggtgattcttgtgcctcagcctcctgagtagctgcgattacaggtgcttgccatgacacctggctgatttttgtatttttggtagagactgggtttcaccatgttgaccagggtgatcttgaactcctgggctcaagttaatctgcttgccttggcctcccaaagtgctgggattacagatgtgagccacctcacccggcctagtgtgttctgatttatgcctgacttttttgtttaattgaaggcttgctttttttttttttttgagaaggagtctcactctgttgcccagactggagtgcagtggcatgatctccgctcactgcaacctctgcctccaaggttcaagcgattctcgtgcctcagcctcccaagtagctggaattgcaggcacacgccaccatgcctggctattttttttgtatttttggtagagacgaggttttgccatgttggccaggcttgtcttgaactcctggtctccagcaatctgcccacctcagcctcccaaagtgctgagattacagacgtgagccaccatgcttggactaattgaaggcttgtaatgttcattcaattttgtgtgtatcagtgatgtgtttttactgtgtatattgtattacattttatgaatataccacaaagtattcacattgctattgatcaacatttgagttgtttttagtttttgccttttgtgaataaaactgaactctcttctgaatgccttttgtttgacatgcgtattgatttctcttggtatatacctacaagtgaaaaactaacgggtcacagggtagatgtatatttagctttagtaagctgctggttttctggaatgttgccagattagactgtagtagcagtgtttgagagttttaattatctgcaccaactcttgataatgcaagtctttttttgtgtgagacagagtcttgctctgttgcccgggctggagtgcagtggcatgatctgagctcactgcaacctccgcatcttgggttcaagcaattctcctgccttagcctcctgagtagctgggatcacaggcacccaccaccatgaccggctaatatttttgtatttttagtagggacggggtttcaccatgttggccaggctggttttgaactcctaacctcaattgatccacccgcctggacctcccgaagtcctgggattacaggtgtgagtcactgtgcctggccagtcttttaaattttagccattttggtgagtatgtagtagcagctgattgtgatttgaatttgcaattccctgatgagttaagatgtgttttctatgcttagtagacatttagatatctatgtgaactataggttccggcctttcctttgtttttattggagtgttagtcttttcctcagtgatttaaaggatttctttgtatattctaaatacaagtatttgtgagatgtatacattgctgatattttctcccagcctgtggtttgccattttattatcataatgctatcttttgataagtagttttaagttttatttaagtcaaattagttaatttattttctttatggttaatgtgttttatgtcctctttaagaaatctttgcttacccttagttttgaagatattcttctagaaggtttatagttgtgattcttgtgttcttgtttttttgttttttttttttttgagatggagtttcactcttgttgcccaggctggagtgcagtggcgtgatctcggctcactgtaacctctgcctcctgggttcaagcgattcttctgcctcagcctcccaagtagctgggattacaggcatgcgccaccatgcctggctaattttgtatttttagcagagacagggtttctccatgttggtcaggctggtctcaaactcctgacctcaggtgatctgcccatctgagcctcccaaagtgccggaattacaggcatgagccaccacgcccggcctatagttttgattcttacttttagggttacctaaactgaatgttttgcattgtattttattttaaatcatgtttcctggagattatcctatatcaatacacttgcttttattgtgtctatacctgtggatgtaccatagtttatttaaccttctcttgctgggcatttagtctctttccattattttactaatactgtaacactacagggaacatcctagcacctatgtaattttctacatgcgcaattattattgttattattattatttttttgagatggaatcttgctctgttgcccaggctggagtgcagtggtgagatcttggcttcaggcatgagccaccacatctggccccacatgtacaattatatctgtaggaaaaatccctagaaggaggctctggtgtcaacagattagttcatttgtatttttgataggtatttgtattttataagagtgaaccattttatattcctgtcagcaatgtttgagaataaaaacctgttttaagttagaaatatctatgcaaataaacaagtagagatgtggctctttccagcgcgcgcgcgcactcgcacacacacacacacacacacacacacacacacacacaccctccctctctgtctctctctctctcactctctcttaaaaattcaactgtatttgctatgggttaaaatacatgttccctgggctggatgtggtggcttatgcctgcaatcctagcactttgggtgaccaagtcaggaggattgcttgagcccaggagtttgagaccagtctggccaaaataggaaagccctgtctctagtaaaaatttaaaaaatttgccaggtggtgtggcatgaacctgcagtcccagctactcaggcagctgaggtgggaggattacttgagcccaggagatagaggctgcagtgagccatgatcttgccactgcattccagcctggacaactgagtgagaccttgtcttaaaacaaaaaacaccaaaaagctatatatatatatatatatatatatataattatattatatagaatatattatatacaaatattacatataatataataaagtatataatatatataatataagactatataatgtattccacaagaaaggtgtcatgtattgctacatcttcagtgcctaggaaagaacttcacgcttaataaatattatagaaattatgggttcttacacatataaaatatatttcttattttatgacttagaataacatatttccttgattttaatcttaaccattataagtattagttcactaacaaaagaggttaaatagtctaggttaagtaatgaagtttttcttaattcatgcacctttctaacatgacactgcttaaatatatctgacctttgattacggtcagagttagagtcagagttaatggtggaataacttaactgctagttttatttatactttattttaattgactttttgtgtgtgtgtgtgacagagtctcactttgtcgcctagtctggagtgcagtggcgcgatctcggctcaccgcaacctctgcctcctgggttcatgagattctcctgcctcaacctcctgagtagctgggactacaggcgtgcaccaccatgcgtggataatttttgtatttttagtagagatgggatttcactatgttggctaggctggtctcgaactcctgacctcaggtgatcagcctgcctcggcctcccaaagtgctgggattataggtgtgagccactgcgcccggcttaattggcttttaaaggtaattattcttgggccagacatggtggctcatgcctgtaatcctggcactttggaaggttgaggcaggaggattgcttcagctcaggagttcgagaccagcctgggcaacatggcgaaaccccatgactacaaaaaatacaaaaaaattagcggggcgtggaggtgcctgcctgtagtcccagctactctggaggctaaggtgggaggattgcctgagcccaggagatggaggttgcagtgaaccgagatagtgctactgccctccagcctgggcaacagagcaagatcttgtcttttttttttttaaagtaattattcttatatataatacatatttattataaaactgaaacaatgtcaaaaataatggggaagaaagtcacaaattatcctcatctcatcagtcagaagttcctagtgttaatagttggtaagcatcaatgttgacatctgtttatgcttatacgttggcatattcatagcatatgacaaacataaattattttataaggatgagataataacatttttgctaatttgaagcaaataagtatacaatttaattgaatttaacagaagaacaattaattgaagtgaaatagagggtattgctccagtttggctactgtttattctttacaaaagtaatcattactaaaagatcctgtgggggttgagaggagattatgaaaacccttaagatgttgaagtcatttcacgcttcttctttttttttttttttttttttaagacggggtctcacccttttgcccaggctggagtgcagtggtgtgatctcagctcactgtaacctctgcctcccgggttcaagcgattttcctgtctcagcctcccgagtagctgggattacaggcccctgccactgcgcctaatttttgttttagtggagacgggggtttcaccatcttgaccaggctggtctcgaacccctgaccttgtgatccatccaccccggcctcccaaagtgctgggattacaggtgtgagccaccatgtcctgcctcatttcatgcttctttaactattacctacatgttccatcatgtattgatttcatgttctgagcaatgattagcattcgaacattcgttccttccatcttccctctcttcacttcccaattgctgctaattaactacttgtacttagtcaaagtttacttcacctttatatgtaaatacttttacttagtaagtgctgtcaggtacttttacttactttgcataacctaactctagtcaagttccataacatgtaaattctatactgcaacaataattcccccaatttgcagttgactgagataaggcatagaagtgggatgaggttgaagagaacgtaccataggaggccaagccttgcggggctgagtgctgtccttatagggttcaggggtcagccctcttcccaagaccccagccaattccctatgctaggcatcctccacccagccaagggtgcgtcccactcccacatgaaggtacgtggcaaatcctggcagcacctttggtcttggttctgggcctgagactttcttccttaagggtatttttgttgacttttcccagtgttaatttattatttcattgtattttccccccttagagatttttggtagcataatttagattcagtcaactggcctttcttcccctcagtattgtcttggtgaggaaggagcagtgaggtgctgtccacacaggcagcacttcaatcttttgcttggctttatcctttcaagtccataacctaagtttgttctcctttcttgttaataggaccaatttgtatgacctaggaaaaataaaaaaaaaaacaaagaaataaatagagatgtttttgagaaaaaaatgtgttggtagaattctgccttaatgtgtttgttcaccaccagaaaattgaagagattttcaatattctatctttatgaatgaaatgatgtacttaacattttatttgttaaaattatggttctatagatcatataaagatttcaagataaaaaaatcttaagattttttgagacagggtctcattctgttgcccagattggagtacagtggcacagtcactgcagcgtcgacctcctgagctgaagtgatcctcccacctcagccccccaggtagctggggtataggcatgcaccatcatgcctggctaattttttgttagctaggagtttcaccatgttaccaaggctggtctctaactcctgggctcaagcgatctgcctgcctcagccttccaaagtgctgggattacaggcatgcgccactgtgcctggcccaaaaaactctgttttttattgtgataaatgtttggggtacctttcaaacaatgtaagatattttatgaaacagaacaaattttactaagaatttccacatacaactatttcagaaatgatagtcatcctgaaagtactacattttaagaattaatattaataacatcattctttttattttctaatgactctcaggaatatggtatataataggaatttggtttattaaaacttattttattttttgaaatagggtgttgctgtgtcacccaggctggagtgcagtggtgcagtcatggcttactgcagcctcaaactcctgggctcaaaggatcctcccacctcagcctcctaactagctgggactatacgcacatgccaccaggcctggctaatgtttttcagtttttatagagacagggacctattatgttgcccagagtggtcttgaaaccctgggctcaagtgatccccacctcagcctcctaaagtgctgggattacaggtgcaagccaccatgcaaggctaaaacttattaaagctaatgaatattataactgtggaaatataactttggaaataatgaggccattttgattttttatcggcaattgtgtaatatagtgcaaagaacatggggtttggagttacatagcatttgaatgcaggctctgccatttattatctatgcaaatttagataagctgtttagacaaactactgtgaacctcccttttttcatctgtgaaatggggataacataactatttctagtggttgttgtgaagatggtacctattaacatccctaaataagagtatgtggtcaataaatggaatatttgatttagtgtactactaattggaggttcagtcctgaaaggtgacatcccttttaggttgtccaaccaccctcacagtgtttccagttactctccagctccttatcctcctttagttttcttcatagcagtcatcttcatgcgtgaaattatatttcattcttattagttactttctttatctacctttaagatgtaagctttatgaaggcacggactggctgtactgtatcccccaaatctagaacaatgcctggaacataatcggcattcacatattgtttgatcgaatgtgtaaatatatttacatttttttttttgaggcggagcctcgctctgttgcccaggctggagtgcagtggctccacctgtgctcactgcaacctccgcctcccggtggctggacagagccaccacgcacggctaatttttctattttcagtagacagagggtttcgccatgttggccaggctggtcttgaactcctgacctcaggtgatctgcctgcctcagcctccaaaagtgctgggattacaggcatgagccactgcacccggcctacatgttttaaaataactagattcttagttagttcagggaacctgcaaataaatatagagaaaataaacaagcatgtttttctacctttacacaacttacttgttggttgactgaattgactgctcagtttagtttagttagttcaactagaactggatttatagactcaatcccagtgactgacattaacactacggatgtttgttattgaagctcatatgatatttcattcgttatttcataaaagttatatcactaggtggttctactttgtttttcttatatttgacccctaaatggaaggaaagccgaaagaagagttgtctgtgaaatttatattggaaagcaaaatcttcaaattcctctaaaacctcttttctaaaacagagtgctagtgaaagatttcacacacacatacacacatacacaatgaatcctggtttttcaagaaatgtcttttgggggaaagggactcccctatttgagatgtttcttttttcatagaaagtatttcattgtggaaggattatgtcttattctgaaatatctaatgcttgctaaaaatttacttatttatttacttatttatttttttgcaacagtcttgttctgtcgcccaggctggagtgcagtggtgtgatctcggctctccgcaacctctgccgcctggattcaagcaattctcctgtctcagcctcctgagtagctgggattacaggtaccaccacgcccagctaatttttgtattttttagtagaggtggggtttcaccatgttggctggactggtcttgaactcctgacctaaagtgatctacctgccttggcctcccaaggtgctgggattacaggtgtcagccaccgcacccagccaacaatttatttattttgtaaaagatcatgcaatcttctgtagtttaaaatgtcaggttttacctctgttatattcctctatcattcaaatgccttttaaataaaatgtacctttttttataaaaaaaatttatttttcaataatttagcacattcatggtaatgatcctttagtttttatgtgatccaaataaaatatttgctttaaagtttgaaaaacaatagtaatgaaaggatatgttggctgggcgcggtggctcacacctgtaatcccagcactttgggaggccaaggtggggcggggggagcatcatctgaggtcgggagttcgagaccagcctggccaacatggagaaacccccatctctactaaaaacagaaaattagccatgcgtggtggcagtcacctgtaatcccagctactcaggaggctgaggcaggagaaccacttgaacccgggaggcagaggttgcagtgagctgagatctcaccattgcactccagcctgggcaacaagagtgaaacttcatctcaaaaaaaaaaaaaaaagaatcctggaaaggatatgtcttcagtttgaacttgtccataaattgcaagagaaaagaacactggtagaaggattaggcaagagacggtttatttttgcctgacttaatgaaagtattgaaaataacaggctgaggctgggcacagtggctcacgcctgtaatcctagcaccttgggaggccggggccggctgttcacctgaggtcaggagttcaagaccagcctggccaacatgaggaaacctcggctctgctaaaatacaaaaattagccgggcatgatggtggatgcctgtaatcccagctattcaggaggctgagacggtagaattgcttgaacccgggagagggcggttgcagtgagccgagatcacgccactgcactccagcctgggcggctgagtgagactctgtatcaaaaaaaaaaaaaaaaaaaaaaaaaaagaaaataactgtctgcattgtttgtttatgatctgtagctttgcatatattcctttatttgtaatctcattgctccttgatattttattttcgccatcacagtctaagaaggagagattggaccttggtcttgatctactgccatcttgtacatagatctttgaaattctctattcatttggtaaatataatggacagagttaataccaggtactatgaatgctcacctgatatttggtccttgtgaaggtgtagatagttgttaactccttgtgtgtgcatgttgggggatggtcggtggagctttttattccaccatcttgctccaccactctccttgacagagttggatcagggttaaatttattgtcatctcatgaaatctaaatttctttaaattttatgatcccattggaatttatttaagaaaagtataattgcatagttgtttctgagagaaaaatagagaggaagagatgatttgcatgtctcaagagtcaatgggatttatatttagaatttcttttcccctgacatttttgggttgtggattaaggtcctttctgggaccagatacagatgaaatttcagcctgttccttgttttcagttccttatggctaagaagattggtttagccaatcttagtagtttttggccttctctatacaatgaagattccatagtaagacccatagcaatgaagccaacccaggtcagctacagctgatttataggtatcttttggttacctataaatagtgctgttgctggtcgaagcagaataaataaatgagatcagagacattatttgaggaaaatgcttaaaaattttctcatctaaataattttacattggagttacatagggtgaggaatgaggatgctggtgtatttccttttttggggagagaaagattcaagccctttgtttggactgggaatgaggattctcaatggtcagtagtccttgttacagaaacagttatttgttggcatctttctaaagagtcttgcaaatgtaatcacatttggaatacataattttttatttttattttttacttttttgtctgagacagagtctcactctgtcacccaggctgaagggcagtggtgccatctcggctcattgcaacctccacctcccaggttcaagtgattctcttgctctggcctcctgagtagccgggactacaggcgcccactaccacacccagctaattttcgtatttttaacagagatggggtttcaccatcttggccgggctggtctcaaactcctgacctccagtgattcacccaccttggcctcctaaagtgctgggattataggaatgagccactgcgcccagcctatttttatttttattttttatatggagtctctctctgtcgtccaggctggagtgcagtggtgcgatcttggttcactgcaacctccgcctcatgggtttaagcgattctcctccctcagcctcccgagtagctgaattacaggcatgtgccaccacacttggcaaatttttgtattctattttttaattttttaagatagaatacattattttcattgagcattctatgtaacaattatttcttgatgttgattcccttgatattgtcaatatcattttgagctgtgttcatttttgtttcatgttacagaggaataagatcatcatagtttatctatatatggcactggtacgctggaatctgtaatactgagttggtttataagcaccagaaatcccagagaaacatcaacaaactgaaaacatttcaaagaaatgttaaaaaaaaagagaaagcttctttttaaaaagtaaaccaggaggaaagactaaagtaaatgttaatataaatggtttgtttcaatgttgtaggttaaaaagaaaatttaagactgggtgtggtggcttatgcctgtaatcccagcactttgggaggctgaggctggcggatcacctgaggccaggagttcaagaccagcctggccaacatgcataaaccccgtctctacaaaaatacaaaaattagccaggcatgatggtggatgcttgtaatcctgctactcgggaggctgaggtgggagaatcacttgaacccgggaggtggaggttgtagtgagccgagatcatgccactgtactctagcctgggtgacagggcaagactacgtctcagaaaaaaaaataaataaataaaatttaagtatcatgaacaatatagcaggagtatagattgggataatggttttaaattactttcaattggaggatgcttgttcctggcttctccactttctgcaaacactgaaccagggatggtgtcccaggcttcttgctgtctaccttgacatctagtcatggttctataacctatgccaacatccactccacttctaaaatctatgcacatactctctttcccaccatcataggtaacaaacatcctggccttttctctcctctgccatgtaatctgaaaaccttgactcttacagttttcttcttaagttcatgtcctgtcattactttgagcagccattgaagacctatttaacacctttattgaacagtcataggaatcaaaatctgggtttgaattttcgttctgtcatttggtgtaacgttagacagattctctaacttcagtttttccatctgtaaaatagggaaaatatgtttttaattttttttctttttgagacggagtcttactctgttgcccaggctggagtgcaatggcgcgatcttggctcactgcaacctccacctcccgggttcaagcgataatcctgcctcagcctcctgagtagctgggattacaggagtgtgcaaccatctccagctaattattgtggttttagtagagacagagtttcaccatgttggtcaggctggtctcgaactcctgacctcgtgatccacctgccttggcctcccaaagtgctgggattataggcgtgagccaccacacccggcctggaaaatatgttttttcactggtaattgtaaagttgtaaagtgatggctgttagtggctatgtaaattaatgtggccattatggaaagcagtatggaggttcttcaaaaaattaaaagtagaacaactatatgatccagcaaccccaccaatgggcatatactcaagcgaaatgaaatcagtaatgtggaagagatatgtgcactcctatgttcattgcagcatcaacttcagtgtccatgaatgaatgaataaatggataaagaaacatggtatatatacgtaatggaatactattcagccttagaaaaaacaaggaattcttgtcacatgttataacataagtgaacctgaaggacattattctaagtgaaataagccaggcacagaagatgaacaccacatgacctcacttatatatggaatccgaaaatgtctaactcatagatgtagagagtagaatggtggttaccagaggcctggggaggagggcaggttagggagatgttggtcaaaggatataaaaatttagctaggaggaataagttcaagagatctattgtacaacatagttaatatacttaatgtacagttgacccttgaataacatgaatttgagctgtgcgggcccacttacatgtggagttttttcaatcaaatgcagcttgagggatacatatatactgagggtcaatttgcatatatttgtgttctgcagggccaactgtggctacgcgactgtattgtgttcctgaaaatctctaagacagtagattttttaagcgttatcataataaaatataagtatatgaagtaatgcatttgttaattagcttggtggagccattctacaatgtgcatatgtttcaaaatatgttgtacacagtacatatatacaataaaagaagaaatacatggttgtaaagtgatggtgcagcatcacacgaggtatatgtgaaaccatgctgtaatttgtagtcttatttagatgccagttgtatggttatctttacttaccgacattcatttgctcaacccactcatatatccacattttgtattttgtgttatttgtgaagattctatttttggttttattctctaattgcatcttttgtatcacaaatttcttgaccttattagatcttttaatattttaaacactttcactcatttatttagtcattgaactcctggcttcactttccctgctactgttcataattaagaagcaataggatagtggatctcttcactatgtcagttctgagcttgaagtatccttcatctggagatagtaaaactctagggaaattttaaaatgatatgtgggatatttcatttgttattgacattagtgcttggggtatggattaaacatccttaatgtatgggacaggcccctgaatctgaatttttcttgcaaaatgccaatagtgcttccattgagagcactactaggtgtgcaggacttctatccatcctttatgacatggttcttaactctattagatttgttttgccattttttccctctgtgcttctgtatgtttttacttatgctgctaatatatatctgtttgtcttcctctttagaatattagtggctgaattgagagagaatctttgggacattccttttgtatatctagaatataacatagaccccccatagagttggtgcttattatttgctgtatatgaatttggaatctttaattgttctaggaaagattcagcttcagtttgataatcagaagctgctacatggttgccatagctatggcacttgattccttctagagttctttaagctacacgcttaaaaggagagcctttcttattaggtaaaaccttgtactcagataatttgaactgggaatttctgggttgtgaatatttggaaaaaatatggtacaaatgtttggaaaaaatattcagctttgaggtagggattaaaaagcttttgttttgttttgttttgttttgttttgagatggtgtctcactctgttgcccagactggagtgcaatggagtgatctcggcttactgcaacctctgccttctgggttcaagggattctcatgcctcagcctcccgagtagctgggactacaggtgtgcgccaccatgcctggctaatttttgtattttcagttggccaggctggtcttgaactcctgacctcaggtgatccacccaccttggcctcccaaagtgctgggattacaggtgtgagccaccatgcctggcctatttttactttctgaattttattaaagcaaggaaccccacccccactttttttttctatctcagttacttttcagagtgttgtgttcatttgggtcataatgctttgaaaaagttgttataattggagaagaaaaatggccaaaatgatttcagggatataaagtagactttctccagtgaaagtctatagggactggactttttgccttggataaggcaaataaatgatttgatgtctgttttaatctatttttatgggtaagatgtagagcagttattgttattattcatagaacaatgaataagagaatattagctcatatcagagaagaggttttagttacctaatgaagagctctttgacactagggcaatgaatcttccaaaagataaagaaataggtccgggtcacacagtttctattagcatgatggagtagaaagatcttgggccttcagacagtcctggcttggaatcttagtcccagttaacacctctcagcctcattattttttcatttgtaaaagtgagaatactaacatgtatcccaacatatgtactaagattcaatgagataatgtgtagacaaacacggaggaaacaatgctagctcctttctccattgtagtgcttgcctggcgtgtaataaacactcagtaactcttctcggtcctctggagatacttaaagagaggtatgagcatctctcctagatgacttagaaatttacctacctaaaggcagggagttagaccaaatgtctctttaaaagttttttacagaatgagttcagaggatgcctattaaatgcaagattgtttatatgcagatcttcgtggatataaatgttgttttgtttcagaagttggagccattgacttttacatttgttctttctaccctctgatccatcagtgcagaaaactgtagcacagaaactgtaactaagaaactttttcttgaagagcagcatggaaagatgtaaaataatttttgaaattatttcttagtctattccttaaaatatcacaattccccaaccttccatttcattttctcccagtcttactctatttaaactcatgaggacagacaggctagatgatattttgggaatctcactgtgggagcttagtaaaaatgattgagatggttttcagtcagtagacaagaaaatagtgtgatcgaagtattaaggcatttttggaaatttgtggttttgtgtatttttcaatgtaggctgccaatgaattgattctttcaattattttctgaaaaaagttttggtttacattgttcagatggtaaaagcatctatggccatacctccctgaacgtgcccatcctgcctgatctctgagtggtaaaagcatgtttctctgtaggtacattagattgtttgcagttcacttgagttgcaaagaacaagccataccggctgggcgcggtggctcatgcctgtagtctcagcactttgggaggccgaggtgggcgaatcgtgaggtcaggagatcgagaccatcctggctaacatggtgaaacccccgtttctaccgaaaatacaaaaaaaaaaaaaaaaaaaaattagccgagcgtggtagtgggcccttgtagtcccagctactcgggaggctgaggcagaagaatggtgtgaaccctggaggtggaccttgcagtgagccgagatcataccactgcactccagcctgggcaacagagcaagactctctctcaaaaaaaagaacaagccataccacattagggcctatcatttcttgactgcagttgtagaaatgacaaattaactcacacatttaaaatttttgctctttagtgattgtctgaaaaggaaagatgaggaatattgatgtataataaaacaatatatggagaaaagatggtagcaaaaagaacagaagcttttggatcagaattcctgagttctagttgtatcatttactctctgtgactttgacaagttaatttattgtctaaatatttctttgttttgagacagagtcttgctctgtcatcaggctgaagtgtagtggtgccatctcagctcactgcaaactctgcctcctgttttcaggcgattctgctgcctcagcctccccagtagctgagatcacaggtgcgtgccaccatatctggctaatttttgtatttttagaagagatgggtttcaccatgttggccaggctggtcttgaactcctgactttaagtgatctgcccaccttggcctcccaaaatgttgggattacaggcatgagccacggtgcccagcctaaatatttctctcatgaattgtaaaatagtgataatattggcacttataaaattatcttttagtgttaaatctgacaacatgtgttaaagcattttgaaaaacatgatgttggaagcatacatgttacagatgtgaaagagatctgaatacagcttattagtttattaagtgcaaaatatttaatctgaacctgatcatgaagccctgaggaaggcatttgaatccagaaaagtggtataggcagcagtttttggataaattgatttggggtctcatcttgactttgctacttaacatctcacagtatttatttaaattgactcttccttagcttctcttctgtaacaaagattgcttgcttgtaagccttgtgtagagtaagttggatgctaaaatttgactatatgatattatgatttataagttcatacttttcatgtttggaagggcagaacattttagtatagtattacaaagacattaataatattaggtaatcaggcacttacaagggatctggagaatgacacaaatcactttgttacattttcccttgagttgcctggctaatatggtgagtccacctgcgatgaagatcagagagagtttttgctttcttctttcccccttcctgtcagtctttcttttttcttcctttcttctggggtctcaattcgtcattttttttttcttctggtttgtggtttgttgaggtttagctggaggtgtatgggtgaaagcttcaagtctttcagggtgtaatgaagaaaaatgatcttcctgttctggtctgcaatgtaaagacctttctcttgctgggattgttcaccacttatagcctaaatttagtgctttgtagtgttaagactcttttctctgtcttattagggctctgtttgtcagtaattagtagacactgatctctaaacaactcgtgtactttcctgcttgtttacctttactgataagaggatcgaactacaggatcctttcaagttctaaaatggtgtgatttagactggaggactccatagtgttactgaggtacataagtaatagactttgttatgcctgtttatagatgaggcagtggaaggagtggagttcagtgttttgagttactaaatggaatttccttcaagtaggggaatgttagtttgtggaaatttgtatgtgaacgtctgtaagcatatttttagtatcaattagtggttcaagtagagtgtgtgtttggaacagaaggttcagatgctgtatagttgcagagtctgtgcccatgaagtgtgaatgcagtgactgtgaggactcatgttctgtgtgcacggaaaccctcatttgatctgaatattccattctttgttctctatgcttgcaattccactgaagacagttttcctgctagttagggctacaagtcatgagaatagtggttttaacaatgaaaatactaccttcatattaagaaacttaatttcctgttgattgtttccccaaatttatttcattttttactctccccaactgatcaataatcaaagtctctgaattcaagtttctaagtatctcttgaatccatggcctccacttgtccttgattgagattctcatctcgtctctctgccctgcactattgcgaagtcattctgacaggtgtcccatcatcacaccaagttgtttataaaaagtctcatttgtgcagccttttaccttcataaagtgcttttatacaccttttcttacttaattctcataccaaatgctgaagtagattttatcattacccatatttgacaactgagaaaaaaactaagaaaggccaagaacttctccaaaggttgtgtggttagtaaatgctagaaaaatttatatttcggaaagtggtttattaaaaaatttgtgtgccccaggatacaaaaaaaatttctgtagattacatttgtataacgaatgactcagtatgaaataaagatacaacatagggacacatacatttaagaatgattttttattttagaaatgaagccaactacttaaaaaaagttttaacacttttgttgttttatgaagtaattaggttgagtaatgtaacaagagaaaaatgcttggcgacttttcaaattcatgcttctttattgaacatatgcccaaattgatttacagcttcaatgcactttttaacaaaacaagattttagaaacttagaaaaacacatgattttttttcacgctgtccctctctcccccctccttcttttcttccttccctcatttctttcttttttctttccctgtttcatttggcaagctctgaatgtagtgggaagagcatagagaaatgaataaaaatgttaaaaattcttaaattgtgtatgtaagtaatcttttaaaatatttaattttgtgatttaagagatcgggatgtaaaggaaacaaacaaaaaaaaaacctttggctggttgcagtgactcaggcctgtaatgccagcactttgggatgttgagacaggcagatcactttaagccatgagatcgagaccaggccaacatgatgaaaccccgtctctactaaaagtacaaaaattagcagggcatgatggcatgtgcctgtaatcccagatacttgggagaatgaggcaggagaatcgcttgaacctaggaggcggaggctacagtgagctgagatcacgcccctgcactgcagcctggacaacagagcaaaactctgtctcaaaaaaaaccacacacacacacacacaaacaaaaaacaaaaaccttcacaggtagtggtgtggtttttccccttcatctctagattgcataatcaaaaaaataaagaaaaaccactaaaccatttctgtcatttcaaaattatcaatttttaaagaaggaatttcaggttttactttttaactttttaattttgaaatagttttttttctttttcttttcttttctttcctttcctttttttttttttttttgaggtggagttttgcttttgttgccaaggctggagtgcaacggattcaagtgattctcctacctcagcctcctgagtagctgggattacaggtgcttgccaccatgcctggctaattttgtatttttagtagagagggagtttctccatgttggtcaggctggtctcaaactcctgacctcgggtgatctgcccgcctcggcctcccaaagtgctgggattacagatgtgagccactgcgcctggcctgaaatagttttatacctatcaaaaaagttgcacaagtagtagagtgcctatactcttcaccccatttcctttaatgttaacattttcaagtagagctatgatcaaaactaagaaattatcattgataatttcttttaataatcattgatacaattcttttatctaaactgcaccttattcagatttgagtgggttttccactaatggtcagcttttacttttagtgaatttttgaatacatgaatgaatgggggatgacagagtataagaaaataacccactgggggctgggcatgatggctcacgcctataatccgagcactttgggaggccaaggcgggcacatcacgaggtcaggagtctgagatcaacttggccgatatggtgaaaccccatctctactaaaaataaaaaaattagccaggcatggtgacatgcatttgtagtcccaagctactcgggaggctgaggcagaagaatcacttgaagccaggaggtggaggttgcagagagctgagatcatgccactgcactgcagcctgggagacagagcaagactccatctaaaaaaaacaaaaacaaacaaacaaacaaaaaaaaaaaaggaagaaaaaaagaaaataacactgggaatggtgaaaatagagaaatacatgaatacatatgggaagtgaataatcagaagacttttagtatttttatttaatactttgtcctcacactataattgtatgtcttaagtgttaactagagactcttccctttcttgtctttattgatgacagtcatatctgttacttttacagcaaaattatcataaatctctctgacaaaagggttacattaattcattaaaagagctaaatacatttaaaaccgtttctgagtgaccatgaacaaaataaaaattgtactatcaatttctagagctataatttaataaaataaaatattacttgatgtttaaaagtctgtatatgagtttaagtccacttctaataaattatggtgagattctcaggcatattgcttaacaaggtttgtgaattacccatttttttcaatgtatttttactaaagattttgagtaatgaatccctttacccatgatagagacaataccaccccattcatcccagagttaaggagaagggagacattgtttagtactgctatagcagcagggctctgtggagttccagatgtggaagggggttgtaccttgtagatacacagccccttctctgattttgtcttcttgcacctgggaatacttaggcactttacagtcacagtgtcgttctctgtgggaatttctactcactaaatggtaatttatttttgcttccttatttctctggcattctgacaacttttcaatgataggaatatatttataagacattttcacagtatgagcatagccacctcagaattgtactaaggagtgaatggtaccccttctttagttattgttacccttgactgaaataaaacttcattgaaataaaacaatagccttgaatgaaagaaaacttctagaatttttactaaatacatgattttaagcaggtctttaaagattttttttaaactttatttttcctgcttcatttaattatcagaattatggagtttaaaaatacaacagctttatggatataattcatatactgtacaactcacccatttacagcatacaattcagtggcttttagtatacttcacaggttttgcaaccttacaacagtcaattttagaacattttcatcaccccataaagaaacctcttacctatttgtggtcattccctattcctgcctccgcccagcccctggctaatctaccttctgtctctatggatttgcctgttctggacagttcacgtaaatggaattatataatatgcagccttttgtgactgccttctctcacttagcataatatttgttaaagtgcttccatgtattagtagaatagtttgtttcttttttgttgcctaaaatatcccaccgtattgtattagtagaatagtttcttttttgttgcctaaaatatcctaccatatggctagtccccacgttatctgttatcatttgatggacatttgggttatttctactcttaggctattatgaataatgctgctataaaaatttgtgtctaagctttttgtgaggacacatgctttcattttcttgtttttaattttttttttttccgagttggagtcttgccctgtcccctaggttggagtgcagtggtgcaatcttggcccactgcaacttctgcctcccgggttcaagcctcagactcctgagtagttgggattacaggcgtgcaccaccgtgcccggttaatttttgtatttttaggggagatggggtttcaccatgttggccagactagtctcgaactcctgacctcgtgatccgcccgcctcaggctcccaaagtgctgggattacaggcatgagccaatgtgcccagcccatgctttcattttcttgggtatataccccttagtgaaattgctgggtcatatggtaactctatatttaactttttgaggaactgccagactgtttatcacagtgactaccgcatttcacagtcccaccaatagtacatgaaggctccatttcttcacatccttcttgacacttgttatttctctttttttatgatagtcatccttgtgagtgtgaagtagtatttcactgtggttttaatttacatttctctgacaactaatgatgttgaatatcttttcatgtgcccattggtcatttgtatctagttctttggagaaatgtgtctttaaaacctctgcccatttaacttcaatttttacttttttaattttttattttatttatttatttatttattttttgagacagagtcttgctctgttacccaggctagagtgcagtggtggaatctcagctcactgcaacatccacctcctgggttcaagcaatccttttgcctcagtgtccctagtagctgggaccacaggtgtgcaccactatgtctggctaatttttgtatttatcgtagagatgtggacttgcttttttgcctaggcttgtttcaaactcctgagctcaaggagtcctccggcttcagcctcccaaagtgctgggatcacaggtatgagccactgctcctgacctacccatttttaaaaaatgggattatttgtctttttattgttgagttgtagactcactgtggttttcatttgcatttctctgatggctaatgatattaagcatctttacgtgtgtttaatgaccatttgtatattttctttggagaaatgtctattgagatcttttgcccatatttaaattaggtcatttttcttgttatttttgcgttgtaagtgttctttaaaaattctgggctgggtgtgatcgctcatgcctttaatcccagcactttgggaggcccaggccagtggattgcttgagcccaggagttcaagaccagcctgggcaacgtggggagaccctgtctctacaaaaatacaaaaattagctgggcatggtggtgtgcgcctgtggtcccagctacacgggaggctgagataagagaattgcatgaacccaggaggtggaggttgcagtgagccgagattacaccattggatttcagcctgggtgatggagcaagaccctttctcaaaaaaaaaaaaaaaaaaaagaaattctgtacaaatttcttatcaagtacatgatttactaaactttctcttattctttgggttgtcctttcactttcttgatggtgtcctttgaaacacatatttttaatttcaattatgtccaatttattttttcttttgttgctagtgcttttgatgtcatatcaaagaaattattgccaaatccaatatcataaagatttactcctatattttcttttgttatatagttgtagctcttaagtttagatttttggtccatttagagtcaatttttgtatgtactgcaaggaggggatccaactttattattttcaccattttttgtaaagactcttccaattgaattgtgttggcatatttgtcaaaaagtaattggatgtaaatgtgagaatttttattgtttatatgtctgccttccaccagtaccatgctgcctttattacagtagctttgtagtaagttttgaaatcagaatttgtgagtcctctaactttgtctttttctagattggttattctttgtttatggtatttccatatgaatttttaggatcagattttatttctgcaaaaaaggtatctaggattttggtaggtagaattgccttgaatatgcagaggagtgtgggaagcattgccatattaacaatattaagtcttctgctccatgactgtgagatgtcttttggtttatttttgtcttaatttctttcaacaatattttattattttaagagtataagtttgtacttcttttgttaaatttatttctaagtattttattcttttttatcctattataaattgaattactttctttatttcattttttgtttgtttattgctagtgtgtagaatacaactgatgtttgtatattggcttttatcttgcaatcttgcttaactcgattactagttctaagagttttttagtggattccttaggacttttgatatataagactgggtcatctgcaaattgagatagttttacttctttctttgcaacctaaattcattttatttctttttgtaccctaactgcactggctaaaacctccagtgtaatgttgaattgaagtggttagagtggacatccttgtctcattcttttaaaaaataattagttaaattttttttcttttgtaaaatatataggcgggggtctcactatgttgtgcagtctgggctccaactcctgagcttaagtggccctcccttcagtctcccaaagtgtgggattataggaatgagccttcgtgcctggcctcttgtcttgttcttcattttaggggaaaacattcagttctttacttttaagtgtgatctgggttatgatttttaatagatgccctttattaggttgagaagtttcatttttttttagctttttaaaaatcgatacataataggtgtacatgttttcagggttcatgtgatcattccatacattaatataatcagatcagggctgttgatatacccatcatcaccttaaatatttaccatttctctgttctaggaacattccaattattccctgctaactattttgaaatgtacagccttttgatgttagctatagtcaccgtactgatctactgaacaacaattcttatttcttccatctaagcgtatgtttgtacccactaatcaacctctcttcatctctcctccccctacccttcccagcctctggtaaccagcagtctgctctctatcttcatgagatctactttgttagcttccacatctgagtcagaatatgtgatatttgtctttctgtgcttggcttctttcatgtaacataatgtcctccagtgacatccatattgttgcaaatgacaggaatttattctttgcccagctaattttttatggctgaataatattcctctctctctgtctcgctctctctctctctctctctctctctctatatatatatatatatggatgtttcaaaaacaactgcaatgtgacatatatatatatatatatatatatatatatatatatatatatatatatatatacagggtctcagtcttttgcctagattggagtgcagtggcatgatcatagctcattccagcctggatggaactcctgcactcaagtgatctttgcacctcagactcccaagtagctggtactaggggtgtgtgccaccatgcccggctaatttttgtattttttggtagagacagggtcttactctgtcacccaggctgttcttgaactcgtggcctcaagtgatcctcctgcttggcctccaaagtgttgggatttataggcatgagccactgtgcgtgaacacattttctttatccattcatcctttgatggacacttgggtttattccatatttccgctgttgtcaatagtgctgcagtaaccatgggagtgcacatatctcttcgtgattgattttcttctttcttggatatctacccagctgtggaattgctggatcatatggtattattattattattattattatttttttttttttgagatggagtcttgctctgttacccatgctggagtgcagtggcacgatctcagctcactgcagcctccgcctcccgggttcaagcagttctcctgcctcagtctcctgagtagccgggattacatatatgtgccaccacacctggctaatttttgtattttcagtagagacggggtttcaccatgttggccaggctggtcttgaactcctgacttcaggtgatctactcgccttgacctcccaaagtgctgagattacaggtgtgagccaccgtgcccagcctttagtgtaacttttattgaaaaaaaattccacgtataagtggatccatgcagttcagaactttgttgttcaagggtcaatgtaactttgaacttgtctctcacttttaagacattaaataattttaaattctaatgacaaatttaattttaagtgtattgatttaaggcattacattacaacttttgacaataataatagtaaactgccagacatttccaagtttcatggcaatatcgtccttgaaattgtattgaaaagcagggaaaaataagtttagctactatacagtctcagttacttgctttaaacattattttgcaaaacagtacttttgcaaaacaattaacatggtttatgatgggctacaaaaaaaggacaaattaacttctgaaaatgattcaacagaagctagacttaataaggaggtaattgaatcactgcatcagccagatgaagtatgaaatgtgagtttttttaggtattctgtgcgatttaaggcttagcagaattaaaggtagtgacaagtagaaactatctgatatatcaatgactaataacaatgttgataattttgataggtgatttttattttgtgtcaagtactgttctaacatctttacatatgggccaaggattggattgtcaaatcagactgacatgaagtggagatgttaatcaatattaagctttccttataatttcaagaatacaagcaatcaaaaggctcagaaaaagcagagacatgtctgggacattgagagaggcccccggatcctttcttactgcaatagacaaaactctgtggcccaaagcagtagatgaggtccttaatgaaatatatgagttattagcagggagtgttacaggctgtgaaacatctccgttttatacccagatagttgcaaagctcatgccctgtgcccagtgctccatgtcccataaatcttgagattctcagtttgtttatcatagtaatcctaattcaggggcagtctgctaacagctttttatgggtaaatagtctttttttaaattattaagcaaacactgttagtatttttgccagctattggcgtgcttacaaggaggtttgaccagattttttaccttctttttttttttttttttttttttttgtgagagagcctctcacccaataggagaaaaacactgctttaactctttctccccaacaaattaactcatttaaattcaattaatttttttagcataaacaagataaaatatatcaagaaggaatttaaaacattgaaacatcagatcggtttctaaaaaatcttttatttttagtttggttagtaggcattggggagagaaatgcactgagaagtatatagtaaatataaatattttcctattaccaacagatattcacaatagcaatttattttattaactttcttgtgtgtatgtgtctgcacagttaatagacaattcttttttctatttcacattagaagatttgagaaatcatatgattcttttaatgtttaattatttcttctttctcaacccaaccttcaaatcagaatggagatccagttcgcccaggagtagctatgactgatcttgccactggcctgtatgcatatggagctattatggctggattgatacaaaaatacaaaactgggaaaggactgttcattgattgtaacctactgtcatcccaggtaacaatccaactaacatttcagataatgttataaaaactgtgtctgggttataccttttcagatcaaattctatggtcacatgtacaaaaacaatacaaaaaccaacacaacaacactgaaaactgtttcattttgatgtacttgtttcttttcttttttgagatggaattttgctcttgttgcccaggctggagtgcaatggcgtgatcttggctcactgcaacctccacctcctgggttcaagcaattcttctgcctcagcctcctgagtagctggggttacaggcatgtgccaccacgcccggctaattttgtatttttagtagagatggggtttctccatgtcggtcaggctggtctcgaactcccgacctcaggtgatttgcccaccttggcctcccaaagtgctgggattacaggcatgagccaccacgaatggcccatgtacttgttttcatattaaaatacacggaccatgaagattttgttgtaatgtagacatcattgttgaacccaaattttccaggctgtttttactagaatgtgtctgttgcttcttataagacaagagatatggttgcttcacatgtactctgtaacttactttgacttgtttcttcaccttttatgtgccacgaacccctttggtagtctggtgaagtctggacttttccttgcaattgtgtttttgaacacataaaataaggtacttaggattacaaaggaagctggttatactgaaatatattcaatggaaaaatcaattttgcattattaaaaatatataatttttactaacacattaaaccacaatatctaatagtgggtgtaacactattataattttgaagtcatgttgagcataagtggtatttcatggtatctgtagtaattgtaatatgatacaaagatatgcataatatttattcgtgatcaagtcataggtaccactaatattcttgtggtttgtcacctacatttataatagaataaaatgctaaattttagaggtgatgaaaataaagatacactttttttttcacttgagttgattaactcccagaaatctgtttatagaccccagataaagaattcctggtttccgtagttatcagttatgttgtgctaaatactaaactgggggaataaaagggttaactcactgtcaaaatgacattttgccttcttttcactggatcagacccagatgctgtaccatatgtggaagttgattctgaatagataatttttccgtgatagaaaaagaaaatatctgatttgtgcaaggagacattttactgtgggaaaaactactttctagacatagagaccccagttgggaatttcagatttaaaaggcatacatgggaaaatagtaaacttggaacactgctttggatattttttcctcttaggcaaaattaaggaggtatatagaaataaaaaacatcaatatggttgaaaatgaaatactatgtatgggtttttacataacagtagcttcgagtcgtggtcagaattttaatgtttctataaaaaggtaaaagaactctgttcaaatgagtggtttcactccttaatagagaactacagatgttagttatgggagggtgcagaaagtcttttcttcctctaattttaagctgtaaggaacctgaggtagggtaagcaactgcataaaagttgcacatccaataagtttggaagccatgaaggtttcatgggtgtgtaatctgtgcagtcatgggtagccctgggcttagttaaatgttctgctgtcactgtcttgaatttgttaataacatccacaggaggccctatagtttttatttacaccagtactcacaaattatgtagcaggtcgtggagttgagactctacttaagtctcctgatttttacctaggctgctttactctaatgtataaagagtattgtattatttagatgagtatcatagagtttaattcacttctagcatctaactagtggttcaccatgtgaaggtgtgtatttccctgggagtaagggtggggaaggtggaatcaccatagggctgcttcaaagtgagggcacagtgacggcaaactcatgcatatacacacaggtatatagtcaatcatttttggggtgtgcatgtgtgtgtgtgtgtgtgtgtgtgtctgtctgtctgtctgtgtctgtgtctatttttattgtctctgtttctccctgagactaaattctatgactgctggcacaatgtttttgtgtaccatggtatcctcaattcccagcccagcctttgtcaaagattggcttttccaatcctttgaggtcaatgtgagaactactgttaccagtgggaatgtctcataacccttaggtttgccaaggaagatgtgaaaagatagtaaatcattagaattatgataagtactcgataaacagctaatgatgagattatttgcttttggcaaaaaaagtagcagtgatttggcctattgtactacagttaactcagattgctaaaattagtgtatttcagtctcattaactatctttctttttttctttttctgtcgcccaggctggagtgcagtgatgcgatctcagctcactgcaacttccgactcctaggttgagcaattcttgtgcctcagcctcccgagtaactgggactacaggcgtgtgtcaaaactcctggctaattttttttttttgtattttttggtagagacggggtttcgccatgttggccaggctggtcttgaactcctgaccttgagtgatccacctgcctcagcctcccaaagtgctgggattataggcgtgagccactgcacccagccagagccactgtgctgagcaagagttctgtttctttattcataaattctattaggtgatggtcttttaaggcaaagaatatgtctcttcatagacttgctacagctgccccattcagaatagcttctgggctgtgagtagtggttagagaacttcaaaaggcaatttaacagataatttgttctttttgttattattattattattattattattattattattattatactttaagttttagggtacatgtgcacaatgtgcaggttagctacacatgtatacatgtgccacgctggtgtgttgcacccattaactcgtcatttagcactaggtatatctcctaatgctatccctcccccatcccctcaccccacaacagtccccagagtgtggtgttccccttcctgtctccatgtgttgtcattgttcaattcccatctatgagtgagaacatgcggtgtttggttttttatccttgcgatagtttactgagaatgatgatttccagtttcatccatgtccctacaaaggacatgaactcatcattttttatggctgcatagtgttccatggtgtatatgtgccacattttcttaatccagtctatcattgttggatatttgggttggttcgggcaaaggatatgaacagacacttctcaaaagaagacatttatgcagccaaaagacacatgaaaaaatgctcatcattggccatcagagaaatgcaaatcaaaaccacagtgagataccgtctcacaccaattagaatggcaatcattaaaaagtcaggaaacaacaggtgctggagaggatgtggagaaataggaacacttttacactgttggtgggactgtaaactagttcaaccattgtggaagtcagtgtggcgattcctcagggatctaggactagaaataccatttgacccagccatcccattactggttatatacccaaaggactataaatcatgctgctataaagacacatgcacacatatgtttattgcgatactattcacaatagcagataatttattctacagcttacctgaagtgcaaggcaatgcctggtaagaactttttcactctctggatttgctgcatcctgagctctgtttttctctgtttgcctctgctttattccttgtctctgtcctccctttcttctcatgtgcccttctctagcctggacatctcttttctcctttttttctctctcatctttctttactttcctgttttcctttctcctctatgctcttgaccttcttccctctccctcccttttatccatccttccttatgtggaactaaggttttagcagttttggtttcagatcttacattttttttttttttaaaagagatacggtctcgtgcttttgtccaggttggaatgcagtggtgcaatgatagctcactgaaacctcgaactcctgggctcaaacaatcctccttcctcagcttccctagtggttcggactacaggcgtatgaccttatgcctggctaatttttgtatttttttttttttttagagatggggggggtctgactgtgttgtccaggctagtcttgaactcttggccttaagggatcttcctgccttggcctgccaacatgttggtattgcaggtgtgagccactgcatccagccagatcttaccagatcttacattcttataccgtattattccaaaaagtttcagaatcttacagtagttcccatgagagataaaggaagttccctttcctagaagtcccagaaaacaagaacatgatttcactggtttaagggaccattcctaaactgataaatggggcctgaaagatagaatacactgagtggcataagcaattcctggtactagcgatggggttaactccatccaaactgtgtggctgagactgggggacaggtgattcctccaaagaatggcatggttattttttggccagaaaagagggaaatggatgttggggaagcaatctacaaatatttactatgctaatgtagagggttgtttttaggatctaatgcaatgaaggatgtgaaaaatactttgtaaatcagaaagtttaatgatgacaacattaattttattaggttattgaaaaaatacttcagtgttagtaatgttagattaaaaagttggctaataacataattattttatcataattatgataacgtttcataatagataaaccttgactgacttcaatttgtctttcaatttaagataacacttataaattctagatctaaaaaccaaccacaacatgattaaaatctgctttatgtaaataaggagtgctatttgtaggtacttttcaaaaaagcgtaacaggaaacttcacctttttttaaattaaaaaaagtattctttttaatataaatgttcacctgcattaagtaggtaacatttgaatttaatttcagctgcgtgagaatgaatacaatttcatgcagtagtaaaaaacacattttcctactcattttgattatattacatagaatgatgaatgattataacattgaatgttagttgctaaaaatgaaattgttatattcctcttaaaagtgatctagtgtaaaaaagacaatttacacctgattggaatagtagctaattattaactcagaaatgattgcctcagccacaacaaaaccatttcaagtagttccttgtagagacatgacaattgccaggatgtggtttgtagtgggcaccacagtttttatagttttaaggctataaactttcaacccttgtcaaaaattcttttgatttttttgtctgaatatgatttaaatttgtccagtcaagacaactaacatcagcatctaaacagtgttctttagatgatattggtaaataacaaggaagcgggtttggatgtggttctgcttattctgttgctctattcttctgttgtggcctacagaaatatcttttggaagttttaatgtccttactgtacttaattgcaaccaggctcccttaattactactacaatgagttagtttttttagcaccataattatttgcatatatagaatatattgtcacttttgatgtgaccatcctttactcacacatgtacattgatcatattacatgaacatattcaagtagaaacaattttaattcttatcattttgactgataaacttttgaatctcaagcaagtaatctaaaattcattgttttgtgtccttagatatacctgtgtttctgcttttttaagcaactctgtatcatttttttaaacaattttattgaggtatatattacatatcataaaaatgacaacttaatgattttagtaagtttagtgggttatgtaaccatcagtattaatcaggttttgatgagtacccgtattgttacttctggtgcgggtcttgctgatgaggctagaatggacgagttttgagtggggagagatctgggactaggctgacttaaaagaaggggcccattatgacttccgtgggccctgggaacttttgcctttgtgggttctttccttcataaaaatattaaaaattacattctataactgcattggtataaagatgaagataattcattattctgcatttattattattacactctttttttctgatttgaaatgaaatgaaaattgaaacatttttgtgtacccctaaagtcttgtgggtcttaagcattgtgcctactgtgcataattgatagatcagctctagaagaattaccttgagaaaagcccgtgaatgtacaaatctgtgaggaaagcagttgtgtatctgggaaggaagtagagctgaaagctgagattgtgttgaagcatgagtataggatgaaagagtagagaggcagcacagtctatgactaaggaaattaagagaactcctcaaagggagttttgttttttcttcctttaagggagaacgaaaaatagaaggttatagcagaaagttgggtatgatactagctgtgggcttgtaatatgtagcttttattgtgttgaggtacattccttctatacctaatttattgtaagtttttatcatgagaagatgttgaatattgctaaatgctttttctgtattcactgagacaatcatataatttttatccttcattctgttaatgaatccaaagcagtctcaggtgaaaaacacaaagctggaggcattatacttcttgatttcaaaatataatacaaaactattgtaatcaaaacagcatggcattggcatgaagacagacatgtagaccaaaggaacagcatagaaagctcagaaataaatacacacagttacaggcaattgattttttgtttgtttgttttagatgtttttttggagacagggtctcaatctgtcacccaggctgtccagtttagcagcataatctcactcactgcaacctctgcctcccaggttcaaatgactctcctgcctcagcctcccaagtagctgggattataggcacaaaccaccacacccagctactttttgtatttttagtagagacagggtttcaccatgctggccaggctgttctcgaactcctgacctcaagagtgctgggattacaggcatgagccaccgcacccagcctgaatatccagttttaccaatacaatttattggagagactgtactttccctattgtgtattgtggcacctttgtcaaagatcaattgactggccaggtgcagtggctcatgcatgtaatcccagcactttgggaagctaaggtgggcgaatcatttgaggtcagaagtttgagaccagcctggccaatgtagtgaaactccatctctactaaaaataaaaaaattagccgggcatggtggcatgcacctgtagtctcagctacttgggaggctgaggcacaagaatcgcttgaacccgggaggtggaggttgcagtgagctgaggttgcgccagtgcactctagcctgggtgacagagctagacgctgtctcaaaaatactgaaaaaacaaaaacaaaaacaaacaaacaaacaaacaaaaaaaccaactggatattcagatgcagaagaatgaggttggacccttatcttacactatatacaaaaatcaacttaaaatggattaaaggggccagtgcagtggcctgtaatcccagcatgcaggagtatcacttgaggccaggagtttgggaccagcatggccaatataatgagaccctgtctatacaaaaaaatacaaaaattacccgggcatggttgtgagcacctgtcacaaccatgtgaggctgaggtaggagaattgcttgagcccagaaattagaggttacatagaattatgagcatgccactgaactccagcctgggtgacagagcgagaccctatctctaaatgtaaataaataaataatatggattagagactgaaacataagatctaaactgttagactatgagaataaaacatagggaaatagcttcttgacttttttttttggtgaagatatttggatatgagcccaaaaagcacaggcaatgaaagcaaaactagacaaacaagattgcatcaaactaaacagtttctgcacagcaaagggaacaatcaacagagtgaagagacaacttacagaatgggagaaaatatttgcaaagcatatatctgataaggggttgttatccaaaatatataaggaacccaaacagttcaccccattaaaatttgggcaaacgacctgaatagacatttctttctttttctttttttttttttgagacggagtcttgctctgtcacccaggctggtgtgcagtggtgccatctcagctcactgcaacctctgcctcccaggttcaagacattcttctgcctcagcctccaaagtagccaggattacagctgcgggccaccatgcccagctaatttttgtatttttggtagcgacggggttccaccatgttgaccaggctggtcttaaactcctgacctcaggtgatctacccaccttggcctcccaaaatgctaggattacatgcatgagccaccgcgcctggccagacgtttcttaaaacaagacatacaagtggccaacaagtatctgagaaaatgtccaacactatgaatcatcagggaaaatgcaaattaaaaccacaacctcaaacttgttagaattgctattatcagcaagagagataataacaagtgttggtgagggtgtggagaaaaaggaacccttacacactattagtgggaatgtaaattagtatagccgttatggaaaacagtatgggggttcctcaaaagaattaaaagtagaactaccatatgatctaacaatcccacttctgagaatatatcaaaggtgaggaaatcagtatgttgaataaatatatgcattttcatgttcgctgcagcattggaatcaatctaaatgtaaataatcagatgaatagataaagaaatgtgttatatatatgcaatgtaatttggtttagccttaaaaatgaagaaaatcctgtcatttgcaacaagacatatgaacctgcaggactaagtgatataagtcaggcatagaaagaaaaatatcacatggtctcgtatatatgtggaatctgaaaaagttgaactcatagaggcagagactagaatggtggttgccaggggctgggggttggaggtgggggcaggggaagatgatggtcaaaggggcaaagtttcagttagatgggatgaataagttctggagatctattgtacagcaaggtgactagagttaatgtgtactttaaatttcgtaagagattagatcttaaatgttcttatcattaaaacacaagtatatgaggtgatgaaggacaggcatggtggcttatgcctgtaatcctagtgctttgggaggctgaggcagatggatcacttgaggtcaggagatcgagaccagcctggccaacctagtgaaaccccgtctctactaaaaatacaaaaattagccaggtgtggtggcgggcacctgtaatcccagctactctggaggctgaggcaggagaattgcttgaacccgggagacagcagttgcagtgagctgagattgcaccactgcactccagcctggatgacagagcaagattccatttccaaaaaaaaaaaaaaaaaatgaggtgatgtgtatgttaactagcttgatttagtcatctcacagtgtagtcatagatcaaacattatatgtactatcaacatttataattttattttcaattaaataaaaaatcatcaatttaaaacattgggaaaaaaaaggatctgttgttaagatgaataattaggaagttaaagacaaaccaaaaaaggaaaaatcagatttcttccaaagaagtaatgctattggttaggttaaatgcaaattgacttcaatacaaaatatggtttgttgtcttcttgaggaaaactgagcgaaatataagtgaattgggaacatgctctggttctgtataactgaagtcattagttatattcatgggcattgcatatttttatatgatatgaactacaaatgaggaaaatcaggtcttcaacttgtgataattgataattactagtgggagaatatcccaaaggaaaaaagaataaaatggggagaaatgttttatggtgatgtaacttaattttcttattagatacttcaaaacactttggagctttcaaatgttcttaaacaatagaaaaataattaagttcaagatataaaagaaatagaaatggaaagatctattgatgttaacatgtatttcctgagtttagattttgtccttggagaacctagtagaatcatgaatttaatggactattcctaaagctgtgtttaatgatatcggaatcatatatattgtctactttcagagttagaacaatttgtttttattactaagttaattaatttcacctttatctttgtactttctcaggtcagggaattttaaattttatttatttatttatttattcttgtttttttcttttttgggggggggcaagaattttatttagaataaaatgttgccatcgtgtccttgtgtattggctaatcaatcagtggtgactatttacccatcttaatttatggaccatgtctgtaaactagatcatgtctctttggtcccaactattatgccatcattgtagctaaatgataaagaaaccacctgcatcaagcattgtggcgaggtgtaattctaggaaaattactttagttcttcacagaatgggtatgaggtataacggtgagtacttttttaatgtttataattggtttgtcggctagagtcattatataccagcaatgataatcagaccttagttacctggagagcttagcaatctaacattatggttgatttcattttctagatgaataatagttaaaaggtagctgctttagtttaaacccttgtcagagaaattcttctaaaatgctttaatttacttttctattgtgatccattccatatgctaaatatattttcacctccaagggtattattctgatctaattccttttacatattgatattcacttaggaagtaagaaattaagttgcatctgtacaaacagaatccaaccatccatccctgctcctcatctattatgtgccagagtatacaatgaatgatagataagccagcaagtttcttgcctcatggaacttttattgtagttggagatatagacaacaaacaagtaattagtaataaatgtacattaggaaacacagggtttgctaaagataacaggggcacttgtgttaggctgggtaggaaagattactttaaggagttaaaattgcggggatgagaaggagcctgccacaggactagccaagtcaagatactctcgcctctctcttaggagaacccctttttttaagtttcattaggcccacatggataatccaggataatctcccatctcaagatctttaatgttatcacatctatgatgttccccttaccatgtaaggtggcatattcataggttctggggataaggacattgacatctttggagactattttcagcctaccacaggtggtaataaggaaggagaaaagggtagacatagtagtggttaaacattgtagaacatgtgaaactttcttctgcttcaggcctttgcatttattgtttggtgtgactgactgaaagccttctactagcagttgtgattggtactaaatctggccatttcttcatactcacgtgaagaataaacattgggtgtggcatttcaaataataaccctatgtcctatagttagtaggtccattcaaagtaaggaatcagtaacaggctgttttttgtttgtttgtttgtttggctgggaaagagggactttcttggcaggacattgggccaagcctgtagagccggagttgactactagtgttgttttggtggaatggtagtagaagcaacacaagactgcagacagctttaatctttctgtcacttggaccctgactggagggtggtattgagaaggttgacatggcttctggaaaagagtgccgtgattattatccttgcctgctgaggtgcaacactgggagggtgctataagtttgctgatcttggcataggtgctgcattacataggctgtttatattctctaaagttgaattattgtgatcagcattgagcgatagaacttaatgtgatcatatattcattttttttaatcttacaaccttgctggactcattatttagttctaagagtattttagtggattctgtaggatttttcctgtgtgagattacatcatctgtaaaataagatagttttacttttctcctctccaatatgaatgcattgtatttctttttcttgcctaattgccctggacagaaatccagtacaatgttgaatggaagtggcaagagcaggcatccttttcttgttcctgatctcaaggcaaaacatttcagtctttcaccattatgtatgatgtaactgtgtttttttccttgatactcttttttttttttttaaagtcaaggtctctgtctgtcacgcaggctggaatgcagtggcatgatcatggctcactgcagccttgaactcccagtctcaagcaatcccccacctcagccccctgagtggcttggactacacgcatatgccatcatgctcagctaaatttttttgaattttaatagagatggggtctcagtatgttgcccatgctggtctcaaactcctgagctcaagtgatcctcctgtcttggcctcccaaagtgctgggattacaagcatgagccatagtgcctggctttccttaatactctttaacaggtcgaggaagttccctccgttcctagtttactgactgtttttatcatgaaagagtgttgaattttggtaaatgctatttctctgactattgacatgatgatttgttttgtgtcacttatcccatttatatgttatttggttattgattgattaacaattgacattgatttttgtatattgaaccaatttttcaacccttggaaaaatttcagttggtcaagttgtatgatctttgtatgtattgctgtactcagtatgctagtatgttgctgaggattcttaggtttatattcataagggatattggtctttacggtctgtagttttcttatgatgtttttggtgtctgagtaacatttgcctcatagaaagagttgaaaagtattccctcctctccttgcttttggaagagtttgtgaagaattagtactaatttttcttttattgtttggtagaattcatcattgaagcttaaaaaaaaaagaaaacaaagcctaggttgttcccccactaaactttaaactcattctgctgaattttgtggttgccaggctgctagtatttagttactaatgaggctgttggttctcaagcctggtagaagtggatgttaacacagcaagttaagatgtcacaaagcttgccggtcttattaaaattcagggtttttttttcttggataaaaactcatcagttattgcaaggctttagttaatttccagagttttcaaaaatttgattttgggaatttttgccagtgttcttgttgcttttatggcagaaggctttatttcatcttttttgagtgtgcttattaccgacacctataatttaaaattccctattagccccattaaaaaaataaagaggaacagatgagattaattttgattatatattttattcaaccaaatatatccaaaatattttcctttcaaaatgtaaaatttgtataaaattaataattattttacttttttcttatatgatgtccttcaagttttatatgtagttgtacatttacaacacatcttaatttggaatattgccatcaaagtctcaatagccacatgtgggcagtggctattgtaatggctagaatagtcttagaacacagaagaatgggctgatgctttgaaatttcagtcttttctttcttccttccccactcatgttgaaagtgaaaaataatgtttaaccactactatgtctctttcctccttccgtattatcacctgtggtaggctgaaaatagtctccaaagatgtcaacgtccttatccccagaacctatgaatatgccaccttacatggtaaagggaacatcatagatgtgattaaattaaagatcttgagatgggagattatcttggattatccatgtgggcctaatgaaactaaaaaaaaaaggttcttgtaagagagaggcgagagtatcagaatcattacaatagtctctccttacctgtgggggatacattttaagatccccagtggatgcttgaaaccatggttagtaccaaaccctataaatactgtgtttttttcctaggtatgcatgtataggagttgaacaatatggtaaaatatttgaatatggcctaatttgaacaatggtaaaatagagcaattgtaacaatatattataatatctctcaacaaattaggtattgatgggacgtatctcaaaataataagagctatctatgacaaacccacagccaatatcatactgaatgggcaaaaactggaagcattccctttgaaaactggcacaagacagggatgccctctcccaccactcctattcaacatagtgttggaagttctggccagggcaattaggcaggagaaggaaataaagggtattcaattaagaaaagaggaagtcaaattgtccctgtttgcagatgacatgattgtatatctagaaaaccccattgtctcagcccaaaatctccttaagctgataagctacttcagcaaagtctcaggatacaaaatcaatgtacaaaaatcacaagcattcttatacaccaataacagacaaacagagagccaaatcatgagtgaactcccattcacaattgcttcgaagagaataaaatacctaggaatccaacttacaagggatgcgaaagacctcttcaaggagaactacaaaccactgctcaatgaaataaaagaggatacaaacaaatggaagaacattccacgctcatggataggaagaatcaatatcatgaaaatggccatactgcccaaggtaatttatagattcaatgccatccccatcaagctaccaatgactttcttcacagaattggaaaaaactactttaaagttcatatggaaccaaaaaagagcccgcatcgccaagtcaatcctaagccaaaagaacaaagctggaggcagcatgctacctgacttcaaactatattacaaggctacagtaaccaaaacagcatgctactggtaccaaaacagagatagagatcaatggaacagaacagagccctcagaaataatgccacatatctacaaccatctgatctttgacaaacctgagaaaaacaagctttgggaaaggattctctatttaataaatggtgctgggaaaactggctagccatatgtagaaagctgaaactggatcccttccttacaccttatacaaaaattaattcaagatggattaaagacttacatgttagacctaaaaccataaaaaccctagaagaaaacctaggcagtactattcaggacataggcatgggcaaggactacatgtctaaaacaccaaaagcaatggcaacaaaagccaaaattgacaaatgggatctaattaaactaaagagcttctgcacagcaaaagaaactaccatcagagtgaacaggcaacctacaaaatgggagaaaattttctcaacctactcatctgacaaagggctaatatccagaatctacaatgaactcaaacaaatctacaagaaaaaaacagacaaccccatcaaaaagtgggtgaaggatatgaacagacacttctcaaaagaagacatttacgcagccaaaaaacacatgaaaaaatgcttgtcattactggccatcagagaaatgcaaatcaaaaccacaatgagataccacctcccaccagttagaatggcgatcattaaaagtcaggaaacaacaggtgctggagaggatatggagaaataggaacacttttacactgttggtgggactgtaaactagttcaaccattgtggaagtcagtgtggtgattcctcagggatctcgaactagaaataccatttgactcagccatcccattactgggtatatacccaaaggattataaatcatgctgctataaagacacatgcacacgtgtgtttattgcggcactattcacaatagcaaagacttggaaccaacccaaatgtccatcagtgatagactggattaagaaaatgtggcacatatacaccatggaatactatgcagccataaaaaatgatgagttcatgtcctttgcagggacatggatgaaactggaaaccatcattctcagcaaactatcgcaaggacaaaaaaccagacaccacatgttctcactcataggtgggaattgaacaatgagaacacatggacacaggaaggggaacatcacactctggggactgttgtggggtggggggaggggggagggatagcattaggagatatacctaatgttaaatggcgagttaatgggtgcagcacaccaacatggcacatgtatacatatgtaacaaacctgcacattgtgcacatgtaccctaaaacttaaagtataataataataaaataaaaaaatatatatatagtaataaaagttatgtgaatgtggtctgtctcagtatatcattacaatatgtactatgctcacctatttctagattgcagttgaaagtggaaagtgaaaccacagattagaggggagtcttatagtttgcgatgtgataatggtagcaagaagttgaagtgatttgaggaatgaggtcacacatctaacatatgcactcagcctctagaagcttaaagaggcaaggaaacagattctcacttgagagcctccagaaggaaccagctttgtcgacaccttgacattagcccatgcggagtgatttcagacttctgacctccaggattataaaataataaatttgtcttgttagaagccactaagtttaggggcaatttgttacagcagtaacgggaaaccaattcaccaccttagcaggtggaggtggctacagacagttttggttttatataccatatgtatatacatacattctgtacaaatgaaggtctttatcagttctgattcaagctttacattgctggtggagttgtacttatttttaatttcagcagttttatattttaggtggattttcatagggacaggggattaacacattgttgagagacaattgtaagaaatttcagccttgctctagagtctgtattttttaaagttccagaaacactgtcttcttggtgggatagttattttcagttcaatcagttcttcctgaaactgaaccacacttacaggatagacgacaattcagatgcattttgaggttttctttaaaggaagcggcagacacttaaagcatgatttgaaatcatgtaagtcattgagtcctttatgaaatgatgatttcctttccaccagacagctctgtaattcttttatatctttgattctattgaactcaagccaggtcacaatagtaaaatgagtacattctccttttgccttctgctaagtctgtaggcccagtttgagtttgaaatttgtacttcattaagtaaagacatacttttaaaattctgtgactgtagtttctggtgcggtatagtcagatatgttttgtcaggtttaataatgcactatcttatcttgtaagcccctgagggaaaatcaggtgcatccatctttcagtcttttaactacagaagctcttgacttgagatatcagctcaatgaatctgaaatttagtttattctgatacacattctacttctgtattttctaactatccccaagctgttgcagattggtatgtaacgtcatgaaaaaaaccatattggtcacttcatcatattatttaatgaaaccgatctagaagacaggttcagagctgtatttagagcataagttttctgtcaatggaggctggaattaatgatttgcatttttgtttgtttaaaagtgttgaaaactttttttttaattgtatgtagtcatatttggtaatgagaatttttctgtgtttataccatacttaagatttttatggcagcttgttaggtcttattgtcactatgaaaaagtgagtattaaccattttgttgttgttgctactgttaaaagtctcaagttgagtgtgctttgacgctcaggaggactcaacttggtctctaagctgtaccttggtccttcacaacaccagtgctcaacgttggctgcccattggaatcacctgtggagttttcagaatttctgctgtctctttcccatccccagagattctaatttaactggtatagggcatggtctgtgtactgaggttttaaaaatctctccggatgattctgatgggcagcaaagtttgaaaactgctgtcccacagaataattcatgaacttatgatgtataaaagtaccagtgagctttttgaaaaactgattcctgggcctcacacgcaagcattgagatccactcagtctggggcaggattcaggaatctgcattttggagtagcaccccagataactctgatgcagtagacccaggggttacaatttaaaaagaaagtgtgttttagggtaaacctgcaaggtgtgtctcttatgtagagaggcttcttggatggttccactaatactatcatttgatactcctaaaattaaatggcattgactttccccaaataatttttaatcaaaactgaagttgtaattgtagcaactttcttggcttgtctgggggatagttctgtacttaatgtctttgctctacaggctacctcaggacaggggactaaaagaacatacagtgatttagaaagagcttttttttttgtttttttgagttggagtctcgctctgtcgctcagactggagtgcagtggcacaatcttggttcactgcaacctccgcctcccagattcaagcgattcacctgcctcagcctccctagtagctgggattacaggcacgcactatggcgccccactattttttgtatttttagtagagacggggtttcaccatgctggccaggctggtcttgcctactcctgacctcaggtgatccgcctgcctcagcctcccaaagtgctgggattacaggcttgagctaccgcgtctggcctagacagaactttaaggcttgataactgtgtggatacaatgaacacaactgaggcaacgaagatatggactaagtgaataacagcagcttacctgtgtaactggtagtctttaggagtgtttaggagctcttcatctgaagcccttgtcctgaaaggaagcagcagcagagagggacattccaatggccatagacatgaacctcaagttagattccgctggtcacatattggttccagagtttacataccagtcttttaaatcatattcacttcccatagatgcgttatgatgatgaagatgatgatgatttgagacggagtttcactctgccacccaggctggagtgcagtggcattgtgatctcggctcactgcaacctccgcttctcaggttcaagtgattctcctgcctctgcctcccaagtagctgggattacaggtgcccaccaccacgcccggctagtttttgtacttttagtagagatggggtttcaccatgttggtcaggctggtctcggcctcctgacctcaggtggtccgcacacctcagcctcccaaagtgctgggattacaggtgtgagccactgtgcctggccctgttgatgcattattaatctcggcactttgaaaaatgaaaatttaaaagctagcttagctgtcagttggaaaatatgctgcgcaaaaagcttagattctgaagtagttctgtggtgaagggcattgttaaattaaccagaaactgtgttttattagtgtacgtgcaaatcatttacacaaatgattgaaatgtgtaacagatatacagaaaatagagacaaagtcttatctttcagtgtttcttcattatgactgtaaaagtatggagcatagtactttttcacatctttaacaaaagaaattcatattagaaaaaaatgccaaaatgatacaaatgtataatttaataagtaaattttttttttgcatttccactgcttagtgataactactatgaaaagtttggtaagtgttttagaaaaaaaattacatttaaagaactcacagggtaggtgtggtggctcacgcctgtaatcacaacactttgggaggtcaaggcaggcggatcacctgaggtcaggagttcgagaccagcctgaccagcatggtgaaaccccatctctactaaaaatacaaaaattagctgggcatggtggcgcacgcctgtaatcctagctactggggtagctgaggcaggcgaatcacttgaacctgggagatggagtttgtagtgacctgagattgtgccactgcactccagcctgggtgataaaggaagactctgtctccaaaaataaacaaacaaacaaataaaagaaaaaatcactaatgaatgtttcttgaatttcttccagggacataaataaatattttcttttagtggtataattggccataatgttgtggcttcggatgaaaactaaactttagaatttagttatgtcataatgtaaacattgtctgtatgagaattttgtaaaaataattgcctatttaggtgcatagataaattttgcattttttaacgcctgcccagttcttctccttacacccccttatctctcctctaccatatgcttaattgctgcatccgtttctttttggaggttctgtagtgtaggtgctgctgatggcagaactagtcatgatttactttgccatgtgtagggcaggtgctttcagccttaatcagtgactgtttctgaactctgcaaaacacactaattgaaaagtcatgttaggcagcacaaaagtaccctatatgatgataatatatccttgttgggcgactgagatgctgttaatagtttggatgccttaagttagtagtttgggttggtcttgtctgaatttatatacttaattaagaaatagtggagaatttaaatgtaaggtaattttgtgcaagtcataggaaaataaaagataggttattacttatgctagtttcctttttttatgtgaaaattctgaattgcttattgaaaagactaaagttaaatattcgattcccttgcagaagaggatgaacacgtgcttcacctactttatcgctggatggcactgtgtgctcttgggctgccctacaaatgggatctctttggtggtcaaaatgttgtgtacccatgtttctggagaaggctttttgtgttcttttctaatgtttgtaatagcacgtgttacttgttgtcaagtgcatattacattttatattgtagttattagtaggagaatattttaatttcaatgcaatgcaatttttttttcccttataaggcaaaatctcagagagagggggaagggagagagacagagtgagtgactcgtgtgtgtgtgtgtgtgtgtgtaattaattttaagcttattgttgaattaacttctctctccatttggtaaccttcctgtataggcctctagggtagtggttaggaaaaccttagtctctctttcgtgtgtgtgtgagtttgtgtgtgtgtaattgatttcgagcttattgttgaacccacttctttctatttggtaaccatcctatataggcctctagagtagtggttaggagcatggactctggagccaaactacattgatttaaatcctcaatatactgctaagtagctatgaccctcaagcaagtcatgaaatgctctatgctttagtttcctcattcactaaatgggaataataatagtgtttgcctccaaggattgctgaggattaaaatgaattaatttttgttaagttcttatggcagtgcccattacatagtaagcaccaaataaatgttagctttatgactatattattattaccactaccttagtttctcctttttcttctctttccttcagtccctcttctgtccatgttcaccttattactacattccttagccatgcatgtcctgccctaggagcccattggttgcagcaaagcctgatttttacctaaagcgtttactttttgatagtcttgcaattatgatgtcttccattatgaagtaagagtcttactttgctactactttttttttttaatttcaattagggtaatgtacatgttaaaatacttcaaccaaaattaaatgaaacatgctgatggcgtatttcttattgtaaacatccatgtgaagcttatggattctggctgattcgtagagtaggcagagaactgagataacatgaatgttcaggaaagacctctttggtagtgagctgtgatgcaaatctgatcattttgaggaaaagtactccagtgcacattgacctctttcgctaaaagagatcttgaggtaactgacgtccagacctttagcattaaattggtgaaaatcagtacactgaaacaaagctcaacatgaattagtacagccagcacatattacccactacagataaaactgttattctctttttttgggtcttgttttgttttgggttctatccacaaactgctcttgactctaaactacatcatttcctgaactttctaatgtattctcaagcatgtcctatatacatgaaggatgtcaaaactcagagacgaaatttttttcaagatgattcataacaatggtatttgaattttgtccctgcccaaaatttatattaagaatctaagaagacacatgatattgttttcctccttctgttttttaaacatagcctttttttttgtctcatgtaacctcaaaacatgttcatgtccttcctttcctttcccttccttcccttaccatcctccctcccttccttgcctcctttgtgtttccttaacctttttttcttgaagttagctacaagccatgcatggctaagtaatgttgaccttataatttggggactaggatagaattccaaatacttgttatttttgagtatcttgatttaaaaaaaaaaaaaagatcagtcaccatgctaaagtaggcctgaggctgaaagtgaggttagtgaggggaagaggaaggaagacagattttttaaagtggtgcattgggatagagacttcttatagttgctcatattgcatagttttaatggtggaagtgattactgttaggacagtgtcaagaaatataaaacccattgatgggaactgttttaggaacttccattggtctttgttctttcctcaattttgtcatctgtatttgttcttaggaccttggaagtggtttttgaacaataattttcttttagtgggtaggactatgaagttcatgccccaggggaagagactgatacgtgcaatcattattgtcgtgggaaacacagacctatatattagaacaggatacactgcagtcatttgtgtaggaatccacttaagatgacttgaaagagaattttcctgaccactatcatgtctggcttcatgttcagacattcttactgaaatactcatttaatcagaggtttctcttgtgaaggaattttttttttttttgggtccaggttttcaagagttccgtcaaatatctgtataaggtttttagacaaatgaagaaaacctgcttttgagaagcaatgatggctttttcactagaaataaaaagttccaggttttatagtttgtttcttaaaaatatatgattaaataattatcttctcttttaaaaaatttgttttttgctgacttcttactttgtgacttgaaatgtatgttacagtcttcttttgtgcttgaataacaatggtttgaaaaggaacaaaaaggcttctaaagatggtatttcaatttgtccaacagtgttcaatttaagccttttattttttaaactttcaaacaagcacagtgacttgatttttttccccatgttatcatctaagagtgtgttttgaatgtgtgttttgaccgtaaaccaggagttgcaaagtcaaatgcttaactatgccagacgggtaattaaaataagtgaactgagtcagacgaaaaacaataggaaatggtgatggatatggactaaagagcccacatcctgtctgaggagagagtcactactctctccagcatgtgctaccacgtgacattgtgatcccagtgcagtggtgtgctggtaaatgtttaacaactggctcattaaaacaagaaaaacaacaacaacaaactgtcacaggttgcatttgccaattctcatggtgtaaacactcccacatagctaatttcaagcctctactatgattgtcactgcacatgtttagaagagatactaataattggctcaatgagcaagtacaagctagctgcagcacaccactagccccagtgtagccaggtttgcaatttttgaagaaaactgatttttttatataaaatctcttgggttttaaaatactatgtaggccaaaaaaaaaaaattaatgaactaaatcatgcttatcagttgccaatttataatctctgacagtaaactgataatacttcttggaaatcttattagaaatcaattttgctattttatagtcaaactgcagatgtctaatcaatggtttcactggtattttttggaatcaacaatttttttatttttatttttttacacatgaaaatgtattgctatcaacagtgttttaatgtatgtttaatattggtataaggtaaaaattagcagttcagaaattattctttgattaattagaacagccagtatacttggaatgtctaaaactgactaaacctggcttgccgtctaggggggttgtttttcctggatgcattatttgtgttagtgaaagatggaaaatgtcagtctaatttattgaaattataaaattgttgtatagcaaaaccctaagtaagctgttttgtgtgtattcccttggatgatatttttaaaattatgttttacaattcttcttacttttgagtatttctgaagcactttttacgatgttaccctgaagtcatacagacaaggctgtgaggaggttagtgctattttgtaaacttgactcaagatacaggactttgctgtacaagggagtgtaatgagggctgagctgagactgggtctcaggcctgttgaatcagggtccaaattccttttcgccagactgctgaggatgtaaaaaagattaaaaaattctgccctcttcagaactgtctagccctccaattgtggttaaagggtgaatggaagatatggctaagataacgatcattgttggatgaatataagaattgacacaacaaagcagagtgcctccttaagggttttatcatattacagtcttctcacatataaaacatagttgtgggtatgttagaatgcagatcatatgcaaatgtgctgaattagggacatatgagtatatggatatatgatatagtatgtcatcaaaggctgattgtgttagtgtacctttgaggtctcttcggggtgatgctgaaaagcccaaacatgtctatagcttgcagcttagatcttaaaagccatccagtttgtgccatgtggtctgttgatgaggagttctgactgtaatgtaagttagtgaatttctgaaatcagtttccttgattttattctctggtgagatgcattagtaaacagaggaacaattatccaggtgtttgtgtgtgcagtgggatattctcagtgttcctgttcctatgaagtgatggccataaaatggcagttatatttaacaaaagcattttgtatgagtttggggaagaggcaaggaggtgtgaaaataacacagttgtcatgcaaactcatgtttgaagtaagtcttctaggcctgttttcaatcagactgtatccctcaactcctcatgtcactgggtattattattataatctcagcatatcgtccctctaagtcactgggttttatagtgtttagtgtgtgtcttttacactagactgtttttccatgaggacagaaaattcatctcttttcaccattctgtctcagcacctagcacggtgcctgaatgaagtaataagtatttgctgaatgaaaacaatgtgcataccagatttttaaaactttcaaataaaacagcattaatataggagaatataaaatgtgttttctctcacttgctattcttcagattgttttttaaatcactgagtttgtttaattaatatagcaatccttggcattatgtacctgtattctttacatgaatttttgcttgaagcgtaaacacgtaacaagtattttacctgctggatcatttggtcactgaaatcatgcatttcttgtcctattccacacctggctttgcacctttccctggaactcccatgagatagatcactttaagaagagtcatcagtaaagaacttcatcatgtactgtgtagtctagtgagtctcccctgttattttgggaaccattccacagaagctcaagagagcagtgcagtgtgacatggccagagaaggactgtgccagctgtgcagtggatcatacaagtaatcgtcagattcaccattacattctgggattttggttgatcagaatgatcagatgtagggagagtgtctaagttcatttattttgatttcatgctgggacttggttcatgagcttgtgatatgtggggtagctctgtaacttaatagttctaagaaaatgcctgaaattccactaagagagcttcattcctttagttgtagagaaagcttttgaatctttattaattttttattaaagtctgtgtagccctggaaagggtaacatcatgaataacctttacttgattccatttttggtgatgtggctgtgcatttccactgttgttctatttctttcctctttcagtgccaaacttcatatgttattagtatttgaggtttctgcttcctacccactaattattttcttaatgctttgcattagactgtacactcccatcctgctactgataatgcctttgatatacattcaacactcttccttctaacactctcctcctttggcctttagacatcacaccacctgttattcttcccacctgttttttttgtcccctccttggttgactccagtggtctgcccttgtcctctgctttccctccaattatccagtctagtcatccacttcagtggctttacccttgtgttagttttctgttgctgcataacagattatcagaaatgcaatatgaaaggtgccttccaacaacacaaactatgattttatagtttctgtatgtctgttgtctggtaatggcttagatggagtctctgctcaggtcttaaaaggctgccattcaggtatctgctggactgaatttctcagcaggacctcagaggtcttttccaagctcatttagattgttggcagaatacagtttctagagctcatggaggttgtgggtttcaaggccaacaggagcatgactctctgagcttcaccttcctttaaaagttagaccaggcccactcaagataatctcttttttgacgaattcattattaactgattacagacataattatgagagtgacgttgcattgtacaggatgtatatgccagaggatgggactcttagtggccatcttagaatcctgcctaccccaagcctcagtgtagataaccactaagtattcatgactgtgtctcatcattattcagggctccagtggctggatggcaaccactcataggcatctccacctggacatcctatcgacacctttaaataaataccccttccccaaacaaacaatcccactctattctagcatatttcttcaccaagaaagccattttttttctttttcttttttttgagatggagtcttgccctgtcacccaggctggagtgcagtggtgcagtctcggctcactgcaacctccgcctcccgagttcaagtgattctcctgtctcagcctcccgagtagctgggattacaggcgcctgccacctcgcctggctaatttttgtgtttttagtagagatggggtttcatcatgttgaccaggctggtcttggactcctgacctcaggtgatccgcctgcctcggcctcccaaagtgctaggattgcaggcgtgagccacctcgcccggccaagaaagctgtttctataaagtaaattcacatttcttgtaagttctgggctaaaaacattggaactctctttgtaacttcttgtttattccctacagtctgttcccaggacttgtgattccatcctttaaatgtctctcagatttgccatttcttctcttttttttttgagacggagtcttgctctgttgcccaggctggagtacagtggcgcgatcttgactcactgcaacctttgcctcccaggttcaagggatcctcctgcctcagcctcctgagtagatgggattacaggcgtcagccaccgcacctggcccatttcttctctttcacactgtccataccttacaaagacctgtgcaagttagcttattgccttgtgagaaaggggaacagtctaaggaatgcctacatgcattatattccatacttccatcgttttgtgccacctctctccccgttttggaggggataatacattattgaatggtgttggctcatgcctgtaatcctagcactatgggaggctgacgtgggtggatcacttgaggtcaggagtgtgagaccagcctggccaacatggcaaaaccccgtctctactaaaaataaaaaaattagccagaaatcggctaattgaactcgggaggtggaggttgcagtaagctgagatcgtgccattgcactctagcttgggcaacagagtgagactccatctcaaaaaaaaaaaaaaaaaagaatgatgttgaagaaacagtaacaaaagagcaccaggacataaaggcaatggtaatcagaactagaggaaaatgtgacaaatagggaattggagagggtcctagaataaccagacaaaggatgtgaagcccttcccagaatgaatcactcctatggaaggaacagccccttgggctccacgaaataatgaaagaaatctgtagaagttagaaggaagtagcctttattcaacttgtttgcttttgatatgcctagtgctatctcatggaacccattggtcaccccatttacaacagactcaccccactccctattcctgggccaattcttttttttttaatttaaatttaaattttttcatatttaaattttttatttttttatttcactaggttttgggggaacaggtgtgtttggttatttgaataagttctttagtagtgatttctgagattttggtgcacccatcacctgagcagtgtacactgtaccaacatgtaatattttatccctcaccaccccccaccctttcctgcaagtccccaaagtccagcatatcattcttatgtctttgcatcctcatagcttaactcccacatatgagtgagaacattggatatttggttttccattcctgagttacttcacttagaataataataataataataataataataataataataataatccaggttgctgttaatgtcattatttcattcctttttatggctgagtagtacaccacataaacagaattaaaaacaaaaaccacatgattgtctcaatagacacagaaaaagcatttgacaaaatccagcatccctttataattatgattaaaaccccaagccaattctgacttcagggaaggtttgctatttcttttctctacccatctgtgggtctttagcatcatcatgcactcaattttagccccacagggtcttgctccctgaagattccctcattgttccttaagccacctttcctcctttcttcaccctgaatacggggcctcagtccctgacattgtttcctaactcagcctctatgtttatccatctggtatgtggggaaggaacaagtgggcttgggctttgtcacttcagtgggcagatccactgaacaaggcaaatttcagcctgaccttctcattctgtggagatgcttttctactattgtagctttctgtgggaattgtacctaactttcctccttttctcttgagcatttcttctttaaattcttcaaattagaggaaagcagtgttattcattcatttttgagtttaactaatagttactgattgcctacagtgtgtcttgggagtgttcctgttgtggagagagagcaggaaacaaatcagacaaatcctttgcttcctgaagcttgcattctagcagacagagatccagaagacaaaatgacccatctgagtgaatgagggaagagttgactgagagatgacatttcaaaccataatccctcctcttctactttttttctcattgtctccatcttgcttagaactccacatcttcaattattcttttctcttgtatatgtagatgaactccagttatttttttatttttatttttttgtgacagggtcttgctctgtgtcctaggctggagtgcagtggcatgatcatagttctctgcagcctcaatattctaggctcaaacaatcctcccttctcagtctcctaagtagctagttctacaggtgcacaccaccacgcccagttaattttttttttattcttagctgagaagaggtcttactatattgcccaggctgatcttgaactcgtgagttcaagcagtcctcctgtcttggcctcccaaagtgatgggattataggcatgagccactgtgcctggccagttattttattttatttgtttacatcctcaaaaagaaaacctttattctttctgctcaccagcttaagctatggtctggtatctctcctatcctttttacacaagctctgagatacccctttggctctcacattgttttcattcattcctttgcccccgttaatctggattttgtccttgctgctttgttgacactgcattttaagaatcatctgtgatctcctggtcattaaatttaatagcttgtctcagtttttattctcaatacttttccaaacatgtgactgtgaccacaatattttcctactgggaaggccctttcctttgtttttgcatgactaaattctctttatcaaaaaatgttagctcgaatgccactttttatcccttcttgattttttaaaaatgtctcttgtagcattgatcatttctattctgaattataaataataaattaacctttctgagagatgaaactgttttattgattttgggatctcccactacacttaacagattgccttgcatataataattacttattaaatatctgttaaatgcatgaagaaagtaataaacacaagtaagtttcatgtcatttttagaacttttcaaaactagaattgtagaataatgtaatattttattctacaagcagaaatattttgaatatctgttatctaaaatgtaaaaaagtatttgaagaagacacttgaaactgaagacttgctatcacaggaataaataagcacactctgtcattaaatgttgtttttctacatttccacttactcatcacattttgtttagttgttcataaccactctttgagtcatgtgattgactgggtcagtggttcatggtaagaaatatgtttgatgtattattctcaacatgcttttgaaattctgtctctctttgctgtctggtcttacctctggcatttgatatccagtttcctcatatgtctgattttgattcatatggattgggaaaattattctcagtataatgtggatctgtttttcttttgagttcataaataaaataaacatcagtatgatttgactgctgttaatgataattcagaggaatgttcctttcgttaagttaaaaaatgactatgaagagaataattccattatgtgttttttctttggtaagtaaataaaagtagagattttaaaactatttaacaactctactggttttcaatgtttacaggtaaaatatttatgggttgaagtttatttctaattacattgcagtgaagccaaaccatatttgcagcaaagcagaaaactttgaataagtactgcattatgtattatgtaataattaaggtcaaatttatatgtagaggttcacctaattggaaaggatgctcaatcactattttttctttaccaagtagtaagttccaactaaacttttccaggttcagggccactcagaaattttgagagaagtctgattctgtatctagtgtagaatgccagaaaccaggctaggtgagttcagaccctggcttgtccacttactaagcatataaccttgggcagattatcagactactcagtgcttcagttttctcatctctaaaatggggtcatcatagtacctctcccataaaattatgatgaggtaattcatgtaaatgagataattcatgtaaaatgcttagaacagtgtgcagtaagtgttagctttgatcagtcgtaaatactagaaactgataaacgtggtgcagatgggtagaatactgattctccttttaacatggcatggacaatataccttatgtactctggagtcttttttcctcctcaaccctagttattctgaaaaaatctgttcaccttatggtgtgagggagaaagtgaagcaagttaaattgcaaggggagtttgacatgtaaagtaacagtattaggttaaaaagagagatgccagaaactcaaaatctctttctgaggcgaggtcaaatttttcttcttgaaagttgtgttttctacgaatgctagccccttcatttctcttttagcattttgtccccataagatattttgtagttagtaaatgagtgaggttgagcagaaggatgtgagaatttattgatttagttaacagtgtgttttctaagtaagtacaggggatagtagaggacttctagtccattccattgatgtagggggacttgcctggaatataaaatgtgaagccaaggatacaaccaaagatacaaatgtgaaactactcactactcgggtgaaaggggcagggagcagaaaggctgaacagagaggagttagtggcttagggatggtgtagagagtacagtgacctgggtttgggtcaggatttttccattcgtcaactatgagacctagttgacgaattaagtattaacatacttaatctccttggtctttagttttttcttataaaatgggagttgcaatgtgactttatttgctttcattcattgcctgttcatacaccataatgaccaggtgatttaattatagaaatcaacgccttcctatgacacttagaataatatctcagatccttacccaggcctgcaaggacccatatgatatggcccttttacactttcctgacctcatcttgtactactgtctcttttacttactaggttccaactccaatggctctctttctgttcttcactgtatgtaagctttttagcatattaaagtcttctaactggttgatctcactgcctagaaagatttcttctaggctgggcacagtgactcatgcctgtaattctagcatttgggaggcccaggcaggtggatcacttgaggtcaggagttcgagaccagcctcgccaacctggtgaaaccctgcctctactaaaaatacaaaaattagctgggcatggtgttgtgtacctgtaatcccagctactggggaggctgagtcagaagaattgcttgaacttggtaggtggaggttgcaatgagagattgtgccactgcactgcagcctgggcaacagagttagactctgtctcaaacaaaaggaaaatttctcctagattttcacaggccttctccaggtcttaagttaaatataacatcttcaaagaggcctctactaagcccattagtttaaaagagcactctctgtgattctgttgcattttcttcatagcacgaatcatttcttgatattttcctgtatatgtctgaatgtaccttaccctagaatgtaagcttcatgagagtaggactatgtctttctccttccctgctgtatccccagtatctagagcaattcctggcacatagtaagtgtgatatcagtgtttttttttttgtttgtttttgagacggagtctcattctgttgcccaggctatagtgcaatggctctatctcggctcactgcaacctccgcctcaagcgattctcctgcctcagccttccgtgtagctgggattataggcactcaccaccatgcccagctaatttttgtatttttagtagagatggggtttcatcatgttggtcaggctggtcttgaattcctgacctcaagtgatccacctgccttggcctccaaaagtgctggaattacagacatgagccactgcacctggcctaaatcagcttttaaataaaagtatggaatgaataaggtgctgactgacactgaaataaatatttgctctttaccctaaaactcctattctatttatgctttcctataagactgggaaaggaaataggaagatgagcccatagcatcttatattgtcacaaagtaagggagtgctaaaaacaaagcccacacagcgatgtgtggtgtgtgagagagagggacacaggtaccaatggagagaggtcctaatggccaaaactggaataatttgatcaacaacaaaaaagtggtattgaattataaccaaaaaagtattaaaaaaaaaaaaacacatgaccatgctgatttaaataaatgattgaataaataaataaataaagggagacaaatgtgtgctaaattctaaataattatgtagatactccaccctccagaagcaggaccataactttctaccccttaagtataggcttatgtagtgacattcttccaaagagtactgtatggaaagggggaggaaaaaagagtaatcttacagcagagaaaactgataaacactacctcagccaggtgatcaagattgattgttgacactgtgtatctttgatatgatatgttgaaattggtgctgttcttttatggtctttcttttaaaacctcataactccagtctaattatgagtaaaacatcacaaaaatcccagtcgaggaaaattctacaaaatacctgatcagtttcctcaaagctttcagtgcataaaaaataaggaaagtatgaggaactgtcacagcgaaaaggagccaggatgactaaatacggagccaggatgactaaatacaatgtggtatcctggttgggatcttggaatagaaaaaggatatgaagtgaaaagtcaggaaatctgagtatgtgggttttagttaataatgtgtcaacattggctctgtaattgttaagaaggcactccactaatataggatggtaataacagggatactggacgtggagtagatgggaattctctgtactatcttggtttttctataaattgaacaatgttctgaaatacaaagtttatttcagataaaattcaaataaaatgttatgaatatttttccacatgatgctatattgttttgttgtgtcatttaagtgcctatttatcttctattgttatatacagatgtcatagcttatttaaaaccacccattcttggcatttaaattggctctagtagtttatacctacatctttgatcatccctttggtgatagaggaaggactgtttttgcatggaaactttatcttctcttgtttgatattatttccgatttcttctcttatctctctttccccttaggttaggacttttaaatactttctataggctgctgagtcctgcctaattgattatatcacaggcatctcaaattcaacacattcagaggtgggctcttattttcttttcgcttcaattacttctctccctgatttccgtttttctgttaaggctgtcatagtttacccagatattcagcaggactgtgggagttaagtttggtttctcctctctgtcaccattctgtctgcatcctctgcccatacaacctttcacatgctctgtctgttctgttcttaaaatatatcttaaactcatgatttttccatgtctactgctaccaaccttgtctgagctatctatcatcaaattatgcctggacctttacaatatccctaacagtcccctttctctcttgcctcttcttagttcattctttgaatataattacaaatgtgggggatccctatgggttttaaatagaagaatgacgatacaatttgtgattgttctgaaatgatcattctgcaagatgtgcaaagaatggctccttaccgttactacaatgactggcatgctgtggcctctgtctacctttctctttcatttcgtttcagtctctttctcaccatggtttagttatatttgtcttctttcagttttgttctttctctatgccaacccctttcctgcctttgagctttcgcacatgttactctttgttttccagttttatcttccatcttctttccccatggcaggtcctataattctttgtttagttattttctttactattccaaagaaggcaagactatatcttttttatttccttatgtatacttagtacctagagtaaagccttacacattagcaacactcagtagttgctgaataattaaacaagtagtaattaccattttcattcatttgttaaaaaatagtgttcaggatctgtgttaagtgctatggaaacacacaaagggtttaaaataaataagtcttaccttgaaatagctccttatttaaaaggagggatagaagaacatataaataatattgtagcatggaggaaggcaatgttgttggagtaaagttctgttattaaccacctgtatgtcctcacataagttttttttttttttttgagttggtcttgttgcccaggctggagtgcaatggcgcgatctcggctcaccgcaacctctgcttcccgggttcaagcgattctcgtgcctcagcctcccgagtagctgggattgcaggcatgctccaccacgcctggctaattttttgtatgtttagtagagacggagtttctccatgttggttaggctggtctcgaactcccgacctcaggtgatccacctgcctcagcctcccaaagtgttgggattacaggtgtgagccactgtgccaggccaagttatttttattctgtgttcctttttgtatccatctggatattaaggagtttgactagactcttgtaaggctatgcttctcaactctggtgtgccattaatactacgctggtgaaatttttttttccaagtttccatccctgaaaaacctgattcatttggtatggggtgggttctatgaattccataggtgactggggggatgcatgggtaggttaaggaagtagtgacctagctcgttctagctttgacatcttacaattctaattgtagtacaaggaagactgtgaaagtgcagtaggaatcagataaattaagtgttgtattcattcgggggcaggaaatataatctcttgcttgctggctgggattggggcttaatggaaaagatgatgttgaaatagactttgaagaataggtggaaatgtgggcaggtgggtgattgcatggttggtgttcagttcaccttagctgtaggccagaagacatgcaagggaagtgggggaaaatgacccattttgatgcagtgaaccatggttctagtcttgtttttttcattttacctgtcacacttggttgtccttttggagatgaaagattgtattattgcagcttgatcctcattcggtggaagtggagcatgtggtgacagacaccatgcgactgctttgagagataattgggcatattcttcctcaagccttttggggctttgctctttgagatccattttgaccaccccattggttttctggttagaaacaaagaatatcaggacccactctgttatctaaaataatagtttgctgtcagaatgattattattaaaccaaagttgacttttttgtttagatgaaaccataaaaaggcaacattctgagtaaattatatagcgtccacttgatgaaataataagcctaagtttagggaatgaaagtaatgatctaatgcagtatttagaatgcatatacagtatatagttattaaccaaaaagtcacatcctgcattcttttaatttgtgcaaaatttgtcattaattgcccaggaaacctctgatttttttcatacataatcacatcatagctattgactttctctcccttctcctgccttaaaatacatccctgtaaatagtagattactttcagattggtaataccccctttaaacattgagttgctaagtttagccatgttgctctctttcttaaaaaatagaattcttttttccccaactttgtctttgagttgttactgacaaatcacactttggtttttttgtttgtttgtttttgtttttgtttttgttttttttgagactctgttgctgaggctggagcgctgtggcgtgatcaccgctaactgcagccttgacctccccaggctcaggtgatccccccatctgttttttttttttgttttgtatttttagtagagacaaggtttgctatgttgcccaggtgggtctcgaactcctgggctcaagcgatccacctgcctcagcctcccaaagtgctaggattacaggcatgagccactgcgcctggcccacactttgttttttcatggcaattggcttaaaattttatttaatccttctgcccaatgtgagcctgctaattctgaaatgctttttgttttcattaactaccactgtatggaggaggaaatgtatatagtattctacttgcaaacagtttgagagatgaattctgattcttcattcaaactcattctaaatggggcaggtcagaaacacagaagtcaaaaactgaaaagaaagaataagatagtgggtaaggaatgaggcagccaagctgatatccagccaggaatccagttcttccctatccctggcaactatcttagatcaatttaggatttataagttggcctgtgatcatccagccacctcaccacctcatgtagcccttgatgatgttggtctattgactttgaaattagagaagtagaaataacaagccttttgtgattgactacttgcacagaataacctttactaatttgaattcttggccttcagtagcaacagagccccttagagagtgacattcgccatgatttatttgaatgaaaaaataaataaaaagaataacaacatagctagatctgaaaagagacctgagaagtcagaaaatgtctccaatttcaggaaggggtgtcaagggaaataactcctattgcatcccttgtgtctttttttttttttttttttttttttttaagacagagtttcgctctcgttgcccaggctggagtgcagtggcacgatctcagctcactgcaccctctgcctcctgggttcaagcgattctcctgcctcagcctcccaagtagctgggattacaggcatgtgccaccatgcctggctaattttgtatttgtagtagagatggagtttctccatgttggtcaggtctcgaactcccatccttaggtgatccacctgcctcggcctcccaaagtgctgggattacaggtgtgagccactgctcccggcccctcttgtctttttatctgccagattgttaagaggaataatagagcccgaagtgtataccacatttgccttgtaagcacgttgaagattacttactattttgcaaattgtgttttgtgttcattctgcctgggtggtgttgcaggactgcttctgcttcatccagagcacttgaaatattatctgcttacatatttatatattagggtttcatgtattatttggttgaatacgagggttctgcttttttaaaaaaaatttgaaaacctttggtttagctgaaatgcccaagactttatagagaatgtatcagaagatcaaagaaggtaaattacatacccacagtcatggaactatttagaggtcaacagagattagaaaccatctaggtttcaaccatccatgtctggacttcctatccagggcatttttgctacaaaatgttgatttgattttccattttgaaagacacagaagtgatctgtgaaatggtgattagcactaggcggccccaggcagccctggaatgctccatggttcaaatgcccaagaccagatggaagtctagaagtggatgactcaaagtttattagttttgccacctgggctgtacagccaaaccagctgccacaggcagttccaattttgacagagcggtaaatgaacataaaagtgagtttaagtcccaagaataaagtaaaggagaatggctgcagcagcaaggtgattcatccaagctgagtcctgttgatatttcttgtaggaagcacagctgctgtgctaggtagggggcaagaaaaggcctgaaaaatcatgccttgagttgttccaggagccaatctcaatttggggtatgttttaatgacaggcttggtaggttttccaatcgcatctgacgatctagaaagggaaaagcaagccggtgctatatcatgattatgtcatgtggcctgaaccactttttattcttttctggaatccatggaaaatcatttgatcacctcctttccatagttctgcggtggtggagccataaatattcattggaacataagatccttgtggcagatcaccaggaatcaattcattatcttcatattatcgtcatattgagttgaactattgtagatttgtcaagatctgtccatgaaatactacagtagtcagaaattgactctaaggttttggatgacccctttaatagatcggcagttctcaaaaattgaatcgagtatgacagtgagcacatggggctaggaacaaattgggagaagtacagtaatgtttctttaaatgaggatgatccactaattaattttaaaaactcaaataatcttgatcttttctgtcagaatgctttgggcagaatgtaacagaaaacctggctaaactgacttaaataaaatggaggtttattattattacttttctgtgtcatcagaaatttagaggaatgtggttcctggctttggttcatctactcagtgatgacacaggctctctttgtgttatcttggtgcaaaataaaaggagatacatgcagaggggaaaaaaatgcacgagttgctgatgtatattgccatgggtttgaggataaaggccagaccacggttccatctgcttggtcaacctctgctttcagataatctttttaggggttgaacgtttatgtatttatatttctcaattgactattacttagtctcatgcaatagtgtaatgccgttcttcatttgtgtgataaaagtacaatgcctgtatattttctaacttgatggacaggtttttttcttctacaatgagatgaagtgaaattactttcataatataacgttctctttatgagtatagataaactagctgttctattttatttatttactttttttcctggtaggtggcgtgtttgtctcacatagctgcaaattatcttattggtcaaaaggaagcaaaacgttggggtacagctcatggcagtatcgttccttaccaggtaagactacagcagtctagggttgggctgttgtaatttgcagttttatatgatgtgtttttggaaaatgatttctttttatacacaaatccttcagctgtttttttttttttttttttgtaatgtatctgtgtctggctataacaaggttctgttgttcactttaagttctgttttgcgtatttcttcatcagaaagagattagtaacaagacccttaaacagatcaaaggaacttgctgaaagtaagtgccttttgggctcgtatgatggttttcttttttttttttcccacctaaaagaggcactgactgtagccattttataaagcatgatttgttaaccatgtcagttacaaaacaaatgttacctaccccatctgacaataatattctcacaggattgaagtaaaatgaaaatttgcgtgtgatggttcttcatttttggaacaaagcagatggctcaggagctgctgttctttattaagtgtcttaacttgtccttagaaattcttgactttggctagtgtaaatgaatatgtgaagtaactgtgatctttcaaaaataaaatttaaaacaaaacctagctcttcttccaatccagttgcttggtccagttgcactgtatgttgttgtatttattaatgtatctgcatatctcctgtactctattgcaaactcttaagagtagaggtgactttttcatcattgtatatcttctcacaatcaatggaagcacatgttaggtactatatacatatctgtggaatgaatgagtgaattttactggagtcatttcaatgttagtgctcttgggagaaaacaaaaaagtcagcatttttcatttgccaggaaattcatcaaccctgctaatcatccttttagctttaagacattatttccttgggcaaaactagtttcttttccattttttaaaatcggaatttgaggaaagcactgacccaatatgaacctgggattcttccctctctgtttatattcatggccctttacctgaggcattactgtgatttcactgtagcactgcttttcaacacattgagttgatctttaggtgtaattacagttgtggaggtgttttctccagttcttcccctttgtctgcaccattcgttttatgaccaccattaatgacattttgcttctccacttcctagccctttgtgactgaccctatacttctaaccagacctgcttcatttcacagacgtcattacattgttgaattggttagagatcatcagatttagtctttttgtttttcagataagaaatctgatacctagattgggcagatgaactccaactgtggtgccctgcctccttgttgagtattctttcagattctgctacctttgataagaaaaggtgatttcagttcccttcatcaactctacccctatcaagggtctccatcaaacttgctcctaggtcaagggtctgatcaactaaatttatactcgtcattgataatggaggtctttctcaagggtattttaacagagaacaatgttggaatctatgggaaatcatctcaaataatggaagtctggctttcagtctttatttatttatttatttagagacagagtcttgctctgttgcctatgtgggtgtgcagtggcacgatctcagctccctgcaacctccacctcccaggttcaagcgattcttctgcctccacctcctgagtagctgggactactggcatgtgccaccacgcctggctaatttttgtatttttagtagagacagggtttcaccatgttggccagactggcctcgacctcctgacctcaagtgatccacctgcctcgtcctcccaaagtactgggattacaggcatgagccaccatgcctggcctggccttcagccttttatgtacgtgaagaaagcattcctgagttggaagattctctagtgtaattccaaatcccatcacataggtaggtgttcactgcgttcaagcataaagtttatagtttattttttgctcatttaaaaaatggaacatcattttaaaaagctttatatagacctcagctattccttctgggcatgtgcacctagagttctggcaccctgggtatgccctcaattatttcactatgtgttgaaaagaaattcagaatcttggcttttattttggaaagtaaaagacataggattttttttctctttctctctgtgtgtgtatctgtgtctgtgtttgtctgttcttcaatgatagaaatgtacttttcctgttgaattgtgccattcacataaaatggatagtatacttatttgattttagttgattgcagctgtattatctataagaaataagaaatctaccaggttatttcctcaagagcccagaattaatttgtttcctcttcccaagaactagttcagcactgtgattaaggaataaatgcaaatttagctgaaatgaaactagcataccaagatgggtcctagatatgcttagagaccccggtctgttttcaattttaaaaatagattgggggaatatttttgtgggtgaatgccaggataattataatttagttttctgtaataattacagaaaactttgcatctaagttgagttgtctgagttttgggctgtctataatggaagactctgatggtcacaggagttacttgaggtgcctagctcactctcctccattcttgttgaaccctatctgaaagattgtatacctcaaatgcatggcatgtaaatttcagaaaagtagtgattcttgttttgtgtgttattttataagcatgcagttcttaacttctcagattgattatcctctcatgcccttttcttccctattctttggctgccagctttttaagattaagtaagttagacaaacgtagacagagctgacataattttgctacttgttgaacatgttggtggatgcttttctgagaattcagatatttatgtatttatttattatttatgagactggttctcactttgttgtccaggctggagtgcagtggtgtgatcatagcttactacagcctcgacctgctgggctcaagtgttcctagtagctgggataccgagtagcggagactacagatacgagccacagtgtctggcaggtttcagatttttaaaaaaaagttttagatttcactgcttcttttgttcccatttctagtggaccctgccacagagaagcacttagcctaagggattaatagttacataatatttgttaatttttttttttttttgagatagagtctcgccctgtcacccaggctggagtgcagtggcgtgatcttggcttactgcaacctccacctcccaggttcaagctatgctcctgccttagcctcctgagtagctgggattacaggcataagcaaaaatgcctggctagtttttgtatttttagtagagatggggtttctccatgttggccaggatggtctcgaatgcctgacctcaagtgatctggctgccttggcctcccaaagtgctgggattacaggtgtgagcctgtaatatttttaatgcatagatatgtttcccagcccttaaacaattatacttaaagacagtaggcttttagagatgggagaggagggtgcagagaaagcagatagctggtctccaaaaagaatatattttattatgtaacatagttgtcagtggggccactgccctttacatacatggccaacatggtaattcttttaatttcatagcctgcatctatctaaaactcttgcccaaatttcttcaaccttctaggaaccttcattgccatgtcctcctttgtttgtgacccacactgacctctactgtctccaatatcgtagaagatccattcacaaatacactcacaaggacaggtgatactgaatatagtgggaaaaaatggagtttttatttacttattttaaaattagattttagagcatacaagtgcaggtttgttacatgcaaatattatgcagtggtgaagcctgggcttttagtgcagtcatcacccaaatagtgtatgtcgtatccaataggtactttctcctccctcactccccttccacctcccatgtttttgagtctccagtgtctattattccactctctatgtccatgttatttagctcccacttataagtgagaacatgcagcatttgacttgctgtttctttttcttttcttttttctttctttctttcttttttttttttttttgaagtggagtctcactctgtcacccaggctggagtgtagtggtgcgatctcggctcactgcaacctctgcctcctcggttcaagtgattctcccccctcggcctcctgagtagctgggattacaggcaaacgccatcacgcctggctaattttttgtacttttagtagagacagggttttgccatgctggccaggctggtctcagactcctgacctcaagtaatctgcccacctcggcctcccaaagtgctgggattatggccatgagccaccgtgcccagccatttttgttttactttgttttattttgacagagtcttgctctgttgccgaggctggagtgtaatggtgctgtctcagctcactgcaacctctgcctaccgagttcaagtgattgtcctgactcagcctcccgagtagctgggactataggcctgtgccaccatgcctggataatttttgtatttttagtagagacggggtttcaccatgttggccaggctggtctcgaatgcctgacctcaggtgatccacccaccttggcctcccaaagtgctgagattccaggcgagagccaccgtgcccagcctgacttgatgtttctgagttattttacattaagatcatggcctccaattccatccatgttgctgcaaacgatatgattttactcttgttttatgtctgagtagtattccatggtatagatataccacattttctttatccagtccattgttgacaggcacttaggtttattccatgattttgttattgtgaatagtgctgcgataaacatgtgaatgcaagtatctttttgagatcttgattttttttcctttgggcaggtatccagtagtgggattgctggattgaatggtagttctattttttagttctttgagaaatctctatactgttctccatagaagttgtactaatttacattcacaccaacaggctataagcattctcttttctccatgtcctcaccatctgttcttacattttaagagcagtgtttttttatagatgaaatgtacccagtcttacaacaggaggcctcacctttctaaccatatcctttgattgttaccagggagtttcactgttctgaatagcataagaatctccccatcttctgtctctctctctcccttctcctttctggcttcagaggtcccttgtctctcttctccttttcaagagcaatgaatttctctagtcttctatgagtttttatgctctctagtgcaggcacagtctttgtgcccacagatctttgggtagctaccactatactaagtgcttaatgatttagttttgatatacagtgaatcccttcccaaggggcaagctgatgtgaggatctaatagaagcccaccagactgtgtttctgatgagaccatctgtccccccagctcattcctttggcagcaggaattgagggagctcacagtttattgtgctcctggcaaaaccacaactccttcagctatagtgttgccctcatgacagggtaaattgcccaagaggccggtcttgagaataagactgtaacctttccttaaaaagactaccagagccagtcatggtggctcatgcctgtaatcccagcactactgatgcgggaggattgtttgaactcaggagtttgagaccagcctgggcaacatagtgagacctgtctctcaaataaaaaagaagaagaaactaggcatgatggcacaagcctgtggtcccagctactctggaggctgaggtgggaggattgcttgagcctcccacctgacttggaaggttgaggctacagtgagctgtgattgcaccactgtactctagtctgagtgacagagcgagaccctgtctcaaataaaataaataaaataaaataaaataaactactaccagaatgagtcccatcactccttatacccatttgcctcaattacaaccagaactccaaaccttttggccatctgttatcacctggacaattttcccatatggctctgttaatctctcttcttttgacccagtcatttctcctgtcatcagtcttggtggctgtaaaatccacatagaggacccttgcaacagtccaccctcttctttctttaacctctcctctcttgcagtgatccttttctgttctcacttggctcccactcccattcacttggtgtttctcaaagtttaaagtgcatgtgaatcatttggatgtcttgttaagatgcagattctgtttcaaggtgatgttgatgctgttagtaggagcactcagtttccagatctaaaatgcattattatcattatttttttagagacagagtctctctctgttgtccaggctggagtagtggtgtgatcatagcacattgcagcctcaaactcaagcaaacctcccacctcagcctcccgagtaatagctgggaccacaggcacacaccaccatgtccagctatttaaaaagttttttttagagacagggtctcatcatcttgcccaggctggtcttgaactcctggactcaagtgatcttcccaccttcacctcccaaagtgctaagattacagctgtgagccattgctcgcagacttagactgttattatcaatgactatagctttgcctttatactcaactggcaaaatcccagtgcggatagacttaatagttcatctattcctggcctgcagtcaagtggtggatatggccagaagaaaatatgctactttgctgatgatctccctcccaatccatggccatctctctcaagtggcccctcgggcttacccagaaatcctgccacctttacctaggtaatttattttctccccctctgagatgactacctcacatcttctcttctctaagatctttccatctctcctcatccttaaagactttgtctcttattccacttaaaattaatgcaatcaaaagagaactaccttatcttttctctactgtacctcccaaactcttgcatttgaacctatatatagatcactgcattccttcctgtcacaagagaggaagtgtccctttccatattttgcctaagggcattgcatctgcattttatgtcctctatcacctgtattatacttcataggataagcagatgatcatataaataaataaataaatatatatatatatatatatatatatatatatatatatttatttattttttgagacagagtcttgctctgttgcccaggttggagtgcagtggcgcaatctcagctcacttcaacctccacctcccaagttcaagcaattcttgtgcttcagcctcccaagtagctgggattacagaggtacgtcaccacgccaggctaatttttgtatttttaatagagatggggtttcaccatgtttgccagactggtcttgaactcccaacctcaggtgatccacctgcctcggcctcccaaagtgctgggattacaggcatgagccaccgcgcccagccagatcatagttttgaccttaaaaagcccaccaacctttctttgattcccaagcaatgtctttttcaaatcctatcctatttctatatgtgctactatacaggactcttccaaaaaattttgggtgattgctggatggaagccctctactgtctattctatgatgtggtctgtgctttgcagaccaatgggagaccccaggagttcaggtggtatgcaatagctaggggtagttgactttctgagtagttcattagtgagaattctttttttatgctctttcatgagcctttcaatgggaattttcctttaaatggcctgataattcacatggtaatttcttctaaacttttcttctgaagtagcttctaactcaagaggttgaagaaaacaattatttacatgattaaataaaataacatcttccttgttccaatttgggcttattcaaccaagcagtagagcaggaagctgtgctatgttatttctggtggggacattatactgtatatttaatttggcagaagcagagactcagacaggcagtaaattccaagtttgaagatatgcagtactttgctatcattccttagaaaaatgtcaaagtgctgttaaatcatggcagattaggtaacattgggaatctttttctttttttttcttaaacacatgttaaggatttttttttaaaaagtcaaaatataaatgatatacatctgtctcttcttgtgtgactttctatttatttattttaccatagtcacactaaggcactaaaatgtgaaggtataaacaggcatatgattctatcacatgtttaaaataattgttgtattagtaataacagtaacaataatcatgatggttaccaacagacatgtactatgtagctgggagatatatgtatacatacatgtatgtatgtatttataaaatttttgcttattcttcttttagtttgatgaaagggaagcctagagacattaagcagttatgttctagaataaataggaaccatggatttaaggttttaaaacttgtttctgtttgtgaccagcctggccaacatggggaaaccccgtctctactaaaaaatacaaaaattagctgggcgtggtggtgcgtgccggtaatcccagctactcgggaggctgaggcaggagaatcgcttgaaaccaggaggtggtggttgcagtgagctgcgattgcaccattgcactccagcctgggcgacgagcaaaactccgtctcaaaacaaaacaaaacaaacaacaacaacaaaacaaaaacaaatttcttttctgactgtatccaaactaagctggatgcatcatggatgtgcgtcttttttttttgtttgtttttggcagattctagaattcttctaatctgtttccattatctctttaacaaatgtcaagtttattatgattctagtgggtaccaaacctaatagctggccttgctacagaagtatctttgaattatgagctgtagggcaagtgtaggtttccccctaccatggtttcagtacattgctttcaaatgactcttgacaaaccaattaaaacataatttcttgagtaccctgtggggtaggcagtgttttagtcctgaaagcctccaaatgaggaagaactgggcccttgatttcaagggactcaaaggcaatatagcagggaaagttgggagaacttgagctttggggtcagacaggcctggagaattaaaagagatcattgtactaagtgttttgtgcagcatctgactctagaaagccctcaataaaaggtggctcctgttattattggtgtgttgaactaataattatagcttttgtgaataatagtttctatgaaaatatgaaatagtctctatgaaaactacccatagaagcttaggggcagagtaaataaataaacagagctgaatttctttcttaaactttatgggatttttagcttaatttcttttcattttttagagaagaaaagagggcaacacgctgtggtaattttgttttaaaaaaactctttgtagaactttttcggaaattgtagccttcagctcattgtccaaatatagcattattaaaattaatagagtttgaggagaatcatgtatggcagcatcactcagttgttacagggagtaaggcttctagtttattgaatggtttaattaattgagattgggtatagattcatacttaacaaaaggaaccatgacaaaaatgattttcaggagtaatctctgagaagcccacaagatgggaacctacctttataaaaaatatatactcacctttgtaagagcaaaaaattgtggagatttctcttttggttttaaaaagtgaaggaaatagaatattttaaacacttgtttttatacccttaaaattgcaaagaatgtcgataatgcttacccattaaaaaatatttggagatttattgggaacgaaagagtaggtgatagcaaagacattagattacatttcagaggcttctacaaacttttgattaattagcactgatgagttagaatattcaaaagttggttttctggtaaattaaggcatggattgtatgaacccccagcccctttagttctaaagtttttggccaggtagcttttgaatatttgcctttgtgtatgccttgatccttacggatttgggattcttgttaaagcaagacaaaatcttttgtttgaagatcctggttactttggaaccagttggccaggaggttgccacagtctgaagaatataggtcactgggcagtccaggagcaggtaaaattaaggcagatgtgccagctgcggcataatagctgccaccctctgggctacttcttaggaaagatttggctgtctttgatttaaaacaaaatttctgaagttaacataaataaggtaacatgatgtccaagggtaactattgcacaaagaataaatgcacttacaactgttcaaagactattatgattttttaaactcagaattccctctgacatatagtgttttaaatgtgtttcgctaagaggtaaaatagaaggtggtgcaaggaaagtaaaagtagtaaatccctagttcctttaagattttttcggcttttcttgtattcttaatatatgtgcagaactaatgtgtttttatattttctatgcctaacatatttggctaaaattatctaaaagaatcaaaggccattttgaatattcagtcattagttctagtaatattatcttaatcactataataattatcagatgtaacatttatcaatgattactgtgttattaaatatcttacatatattaaatcaatatttaccacagcccttaaaatagttattgctattatctccactttcacatgtggaaactgaggcatagagagtttagataacttgtgcagggtcacaagaccatggtataactgggattctaactgaggcagggggacttgagctcattgtactgtataggcagatgatacaatgctgcatgtttagtttcattttctatctttatcctacttttgagaaataattatgtgaccttttcctctacataatttcccctttaggactgccaagagcaattcaagaggtataaacaattctgttgtttactcatcacagggatccttaattatgacttaaaagcaaatttccttcagaaatcaggttgtacatcttttgaataaatcctttggtcgcatatgctaaaatggtattaggatcataagtaagtgatggtatagtgaagcaactctacctattaacagttccacctatttaatgagaacagtccttgagcaatataggagttggggatggttttagctgttgtgagactcatcgtttctagttttcaacctgtatttctggagtttggtagtgtggggacagagctgggatgggaaggaatatttgggacatgaggaggagtattccagggcctaaggagggggatagcctgggtagaaaccaagtagacagttttctaagtattcacaccccatttcaaccagaacaattccaccttctggtagttttttgaaacagggattccactgcttaaaactcattacttgtcctagatcgatcatcttgtactgaaggactttattgaacaagaaagtgggttttgtacatgtgtatgtgtgtgtgtatgtgtgtgtatgtgtgtgcatgtgtgtgtatgtgtgtgtatgtgtatgtgttttggagaaaagagactgatttccttcagtgctggaaatcattgttgtcgttcctagaactgtggacctaaaaccaaagaatgggttcaaatctacccaaggtggaggcctaggtgggaagagtttgggtgaggcctggcatagctcctctttgaagggacacgcacattacctcgcagctaagagtctagcctggtggctctgtgtggaggtcagggctctttagctcaaataaatcacacaggactagtttatggaaacagttggattcgcatgtagttacatgtcctgttttgttcctaggggtgtccagtgcaaatcttgttgaaattctgagtagctgtgcttagcaccaacacagtaccctgatagatctcagttcaggtgcaggctgcctggggggaaaataactgagttctgatatggtaccaattactattatagtttaatattaggcaaataatataacaatggtagaaagcctgtaagatgttaagtactgaagtgaatctgtactggagacttgaacaaatcatgttgatgtataagtatggctgtgaaataggctgtttccttcttaagtttgcttctggcatttaggaaaaggagtactgcttcagggaccctgcccagacaggaaatggtacgtgtgcatgctgagtggtgctagtgaaataggaacattatacagaattatattaataattcatttggcctatttttcacctggaaagtatttactctcaagtgccccctcctccttctcgcctgagggtgaaagcaggtgcgaaatgctctgggtcctagtgacactgagtagtctatggagtggcagcattggcatcacctggaagttagaagtaatagattcattctaatgaaccagaatctgcattttaacaagatgtgtgcacaggtgatttgttttccttagacccttgttgtcattctaatatgagtccactagatgtcactcttgtaacctggtaatgggacaggatttttcaatggggatttgcaagaatccctgaacatgatcatattattattagatgatttcctccccatccttacagctactgatatacacattgattatttaaggtaaaactatcattctctatggttcaaagtcctggagagagattcctgggaatgatttccatttttttggattggcactcctgcctactgtcttccctgttgcatgggttagtctgtcattatataacctcagcagagaatacactgcagatgctgtgacaggctcactgagagaacagcatcctgggcttctgagcacagcaacacagaataaacatacagatttgatctccgtagacattattgagaacagaaaggaagcaaggctgtatcctgaaattagcatcagcctctaagatgtgattgttggaggaagtgctgacctttctgagtgtgtgaggtgtctcaagggaagttttataaagaagattgagtctgcttaggaaataatgtcccaaatgtaatcttgtagggagttagtttcagccatgaaggtgaatatagggacatttacaggtaaagtaatatcctgagggagaagatatacatttagagatgtatgaggttcctaggaaaggtcctgttaacaactggttaggtctgcatattaggaaagaagggtgaagagggtaaggactatgctttagaagatccgattttttttttttgccggatgcctagcttgagaaaagttagttcttgaaagaaattacctgctggcaaacgctcctacctctaagtccggcatggtttttcctctgtttcagttaacaaggttagcaaacaagtcataaagtagcaagtgtttgtgtgtgcttgagtgtgttttgtgagtgtgtgtatttcctcttctggatgggggggcatttactttatatcactaaatgcgtggcaaatacttggtttgggtaatttcagccaagaaaatggttttattgatgtaaaaacaatacagttttagcttacatataatttttttttgttcaaataattaaggtcaccatagtaattacttctaagctttagggtcttttctaacatcatttattctgatgtgattccttatgaccagaaacagaattaattttgaagcattttagtgaaaatgaattttatttttctaaaacattatctaaaatttagataattttttgacttccctgcgccacattgaaagaagaagaattgtcttgggccacacataaaatacagcaacaccaaagatagctgatgagctaaacaagaaaatcacaaaaaaaatctcgtaatattgtaagaaaattcatgaatttatattgggcattcaaagcgtcctgggccacatgcggcttgggggctgcgggttggacaagcttgatttaaatcatggaaaacaagcctaaaatgcccattcctattcttaggcacagtctaaacatctacttcttcagtgatagtattttacacacccatcctctttactgctgaatttttttttcctttttcttttcacttgttgctgctgagactcaacttgctagagatagcagcacatttaggtgtagtgtttaaaagcatgcatgagctttggagtcagacagaccttggcacattgcttcatctcactgatccttaatttcttcatgtataaaataggtatattactacctggtgacaagtcacaggacagtgcatttaaaatatgtggcatagggtctggcacatagcatatgttcagtagccggtagctgtgactgccagtactacacgagctcagagaccgcaggcctgctgctgttgtctttatctcccagctgataacccagttcatcaactgccaggagtccttgttcctataggttttgtccaccagagtggagctctgggtcatggagaagtcttccttttcctctgcctggccaatgtgttcatgacaatggtgtgggtcagtggggagcagattggtagtctggtagaggggcagggaaacatgtgaatcctagaacagtaactgggagagaagttccacactgagattctcaatgaaaatttccctcatggtgatcaagctcagtagaattgttagcaccgttagtgttgttagtatagccatcttacaggctgggccatttaaactgcaaatggcatagtcactgatttaagctttatttctaaagagaaacaaactcttagaagcaaactgccaaattcttattgaatgtttgccacataaattccagattgtctgttctttattatctttattggtttggaatgaccatttttggttcagggaggacctctagactttgaatagctatgactgacaccttggggtcaccagaacattacttggttagcagcagtcttggaaaacaacttcaaggaagtctgaagagatctctcatcctgaaaacatcctagtaagaatctttgcacttccatcataaacagccccatggtttcgcttgataatatgccactgatgaagaatgatggagattctgatgtgacatcacctgtattagtagtgtgctgtctcaaatagaagaagaatacaatattaaagaattaagagcattatgtatcttaaaaataaactcatctttcttgttagacttttggaatctgcattggatttttttttttgtttttttttttttacatagttaaatttaagatatatttctagtcattgtttaaaatgcatctcaagaaactttagaaggggtgtggattgttcttttttgcctaccatgtcattcctgtttccattgtaggaatcaaatcagtaagttcagtcctagttcaaagaagctgggaggcagggaacaaaacttataatagtgttactgtgtagactgcaaaagaatctgaggtttgttcagcaaacataatggtgcattgaggtgttgcattaatgtggggggccagaaaatgagctctgtgtgtagtgaatctgttaagtggcagtttagggtttaacctaaaaactgggagaaagttgataagtgcagaggaagcatgagacccaatttgacacagaccttgctagggttatggtgtcaggcagtggagggagtagtgacaggagaagaggatttagtggtgtattggatgaaggtggtgtgttgggcatggcaaaatcatccatccatctagacagcaaattaacagttttgtagaaacgtatagtccccaagtatttatatgcatattagatacgtaaatgctaaaagcataaaaaaagaatggatagaatgattggtggcaagtaagtatcctgattccattttcctttcataatcttggtagaaggagtaaattagtagaaactaatggaaactactactgctgggttaggaaatctttaggagcatcagggttggatgaaatagtggaattataacattttatgtacagaatgatgaaaacagattgaatataatgaaaacagtaaagaaaatgtataaaataatgctggacaaatatattctctgtgaatgaggaaacacatggtcagtatgtaataataatagtatatttagtggccgggcgtggtggctcacacctataatcccagcactttgggaggctgaggcaggtggatcacttgaggtcaggagtttgagaccagcctggccaacatggcgaaaccacatctctactaaaaatatgaaaattagcccagtgtgggggcatggacctgtaaccccagttacttgggagggtgaggcaggagaattgcttgatcccgggaggtggaggttgtagtgagccaagatcacaccactgcactccagcctgggtgacagggcgagactctgtctcaaaaaaaaaaaaaaaaaaaaaaaaatatatatatatatatatatatatataaatatttataaaatacacacatatatataatttagtgacagcatcgaccagtggctcttttttttttaaatttaagttctagggtacatgtgcacaatgtgcaggtttgttacatatgtatacatgtgccatggtggtgtgctgcacccattaactcgtcatttacattaggcatatctcctagtgctatccctccccactccccgcaccccacgacaggcctcagtgtgtgatagtccccttcctgtgtccaagtgttctcattgttcaattcccacctatgagtgagaacatgcagtgtctggttttttgtccttgcgatagtttgctgagaatgatggtttccagcttcatccatgtccctacaaaggacatgaactcatccttttttatggatgcatagtattcatggtgtatatgtgccacattttcttaatccagtctatcattgatggacctttgggttggttccaagtctttgctattgtgaatagtgccgccatgaacatcgtgtgcatgtgtctttatagcagcatgatttatattcctttgggtatatacccagtaatgggatggctgggtcaaatggtatttctagttctagatccttgaggaattgccacactgtcttccacaatggttgaactagtttacaatcccaccaacagtgtaaaagtgttcctatttctccacatcctctcccagcacctgttgtttcctgacattttaatgatcatcattctaactggtgggagatggtatctcattgtggttttgatttgcatttctctgatggccagtgatgctgagcattttttcatgtgtctattggctgcataaatgtcttcttttgagaagtgtctgttcatatccttcgctcactttttgaaggggttgtttgtttttttcttgtaaatttgtttaagttctttgtagattctggatattagctctttgtcagatgagtagattgcaaaaattttctcccattctgtaggttgcctgttcactctgatggtagtttcttttgctgcgcggaagctcttttgtttaattagatcccatttgtcaattttggcttttgttgccattgcttttggtgttttagacatgtagtccttgcccatgcctatgtcctgaatggtaatgcctaggttttcttctagggtttttatggttttaggtctgacatttaagtccttaatccatctggaattaatttttgtataaggcgtaaggaagggatccagtttcagctttctgcatatggctagccggttttcccagcaccatttattaaatagggaatcctttccccatttcttgtttttctcaggtttgtcaaagatcagatggttgtagatgtgtggtattgtttctgagggctctgttctgttccattggtctatatctctgttttggtaccagtaccatgctgttttggttactgtagccttgtagtatagtttgaagtcaggtagcatgatgcctctagctttgttcttttggcttaggattgtcttggcaatgcaggcccttttttggttccatatgaactttagttttttccaattctgtgaagaaagtcattggtagcttgatggggatggcattgaatctataaattaccttgggcagtatggccattttcacgatattgattcttcctatccatgagcatggaatgttcttccatttgtttgtatcctcttttatttcattgagcagtggtttgtagttctccttgaagaggtccttcacatcccttgtaagttggattcctaggtattttattctcttcgaagcaattgtgaatgggagttcactcatgatttggctctctgtttgtctgttattggtgtataagaatgcttgtaatttttgcacattgattttgtatcctgagactttgctgaagtagcttatcagcttaaggagattttgggctgagacaatgggttttctagatatacaatcatgtcatctgcaaacagggacaatttgacttcctcttttcctaattgaatatgctttatttctttctcctccctgattgccctggccagaacttccaacactatgttgaataggagtggtgagagagggcatccctgtcttgtgcgagttttcaaaggcaatgcttccagtttatgcccattcagtatgatattggctgtgggtttgtcataaatagctcttattattttgagatacatcccatcaatacctaatttattgagagtttgtaacatgaagggctgttgaattttgtcgaaggccttttttgcatctattgagatagtcatgtggtttttgtttttggttctgtttatatgctggattacgtttattgatttgcatatgttgaaccagccttgcatcccagggatgaagcccacttgatcatggtggataaggtttttgatgtgctgctggattcggtttgccagtattttactgaggatttttgcatcgatgttcctcagggatattggtctaagattctctttttttgttgtatctctgccaggctttgatatcaggatgatgctggcctcataaaatgagttagggaggactccttctttttctgttgtttggaatagtttcagaaggaatggtaccagctcctccctgtacctctggtagaattcggctgtgaatccatctagtcctggacattttttggttgataggctattaattattgcctcaatttcagagcctgttattggtctattcagggattcaacttcttcctggtttagtcttgggagggtgtatgtgtccaggaatttatccatttcttctagattttctagtttatttgtgtagaggtgtttatagtattctctgatggtagtttgtatttctgtgggatcggtcatgatatcccctttatcgttttttattgcacgtatttaattcttctctcttttcttctttattagtcttgctagcggtctgtcaattttgttgatcttttcaaaaaaccagctcctggattcattgattttttgaagggttttttgtgtctctatctccttcagttctgctctgatcttagttatttcttgccttctgctagcttttgaatgtgtttgctcttgctcctctagttcttttaattgtgatgttagggtgtcaattttagatctttcctgctttgtcttgtgggcatttagtgctataaatttccctctacacacagctttaaatgtgtcccagagattctggtatgttgtgtctttgttctcattggtttcaaagaacatctttatttctgccttcatttaattatgtacccagtagttattcaggagcaggttgttcagtttccatgtagttgagcgattttgagtgagtttcttaatcctgagttctagtttggttgcactgtggtctgagagacagtttgttataatttctgttcttttacatttgctgaggagtgctttacttctgactatgtggtcaattttggaatagtgctatgtggtgctgagaagaatgtatattctgctgatttgggatggagagttctgtagatgtctattacttctgcttggtgcagagctgagttcaattcctggatatgcttgtgaactttctgtctcgttgatctgtctaatgttgacagtggggtgttaaagtctcccattattattgtgtgggagtctaagtctctttttaggtctgtaaggacttgttttatgaatctgggttctcctgtattggatgcatatatatttaggatagttagctcttcttgttgaattgatccctttacaattatgtaatggctttctttgtctcttttgatctttgttggtttaaagtctgttttatcagagactaggattgcaacccctgcctttttttgttttccatttgcttggtagatcatcctccatccctttgttttgagtctatgtgtgtctctgcatgtgagatgggtctcctgaatacagcacactgatgggtcttgactctttatccaatttgccagtctgtgtcttttaattggagtatttagcccatttacatttaaggttactattgttatatgtgaatttgatcctgtcattatgatgttagctggttattttgctcattagttgatgcagtttcttcctagcctcggtggtctttacaatttggcatgtttttgcagtggctggtacaggttgttcctttccatgtttagtgcttcattcaggagctcttgtaggacaggcctggtggtgacaaaatctctcagcatttgcttgtctgttaaggattttatttctccttcacttatgaagcttagtttgggtggatatgaaattctgggttgaaaattcttttctttaagaatgttgaatattggcccccactctcttctggcttgtagagtttctgccaatagatccgctgttagtctgatgggcttccctttgtgggtaacccaacctttctctctggctgcccttaacattttttccttcatttcaagtttggtgaatctgacaattatgtgtcttggagtgcttttctcgaggagtatctttgtggcattctctgtatttcctgaatttgaatgttggcctgccttgctaggttggggaaattctcctggataatatcctgcagagtgttttccaacttggttccattctccccgtcactttcaggtacaccaatcagacgtagatttggtcttttcacatagtcccatatttcttggaggctttgttcgtctctttatattcttttttctctaaacttctcttctcacttcatttcattcatttgatcttcaatcactgatagcctttcttccagtggatcgaatcggctgctgaagcttgtgcattcatcacctagttctcgtgccatggttttcagctccatcaggtcatttaaggtcttctctacactggttattctagttagccattcgtcttatcttttttcaaggtttttatcttctttgcgatgggtttgaactttctgctttagcttggagaagtttgatcgtctgaagccttctcctctcaactcgtcaaagtcattctccattcagctttgttccattgctggcaaggagctgcattcctttgtaggggaggggtgcttggagttttagaattttcagtttttctgccctgttttttccccatctttgtggttttatctacctttggtctttgatgatgatgatgtacatatgggtttttggtgtggatgtcctttctgtttgttagttttccttctaacagtcaggatcctcagctgcaggtctgttggagtttgctagaggtccactccagaccctgcttgcctgggtatcagcagtggaggctacagaacagtgaacattgctgaacagcaaatgttactgcctgattgttcctctggaagctttgtctcagaggggtacccagccgtgtgaggtgtcagtctgcccctactggggggtacctcccagttaggctactcagggatcaggggcacacttgaggaggcagtcttagcgttctcagttctcaaactctgtgttgggagaaccactgttctcttcaaagctgtcagacagggacatttaagtctgcaggggtttctctgccttttgtttggctatgccctgcccccagaggtggagtctacagaggcaggcaggcctccttgagctgcggtgggctccacctggttcgagcttcctggccgctttgtttacctactcaagcctcagcaatggtgggcgcccctctcctagcctcactgccatcttgcagtttgatctcagaccgctgtgctagcaatgagtgaggctccatgggcgtgggaccctctgagccaggtgtgggatataatctcctggtgtgccgtttgctaagaccattggagaagtgcagtattagggtgggagtgacccgattttccaggtgccatctgtcacagcttcgcttggctaggaaagggtattccctgaccccttgcgcttcctgggtgaggtgatgcttcaccttgccttggctcacgctgggtgggctgcacccactgtcctgcactcactgtccaacaagtcccagtgagatgaacctggtacctcagttggaaatgcagaaatcacccgtcttctgcatcacttacgctgggagctgtagactggagctgttgctctttggccatcttggaaccgcccttttttgcccagtggctcttaaactttcttgttgcctgtaattcttttgaggaactgatgaaatctatgaaagcctttcttagaaaagtacacatattgatatacatgcatgatttttgcctgggatatcaggagcttcttagacttcctagaactcattcctggaccctaggttaagattatctgccagaaaccaactcaatatggtaaggatagtgaaattacattgggaacactggaaaattagaacaaatagtagtaagtagtatgagagaaatcacactatacaactgaaaaaagattgtgcataagtatctgccacatagggcaagaagtgttagaattacataaggaatggaattatactggacttgggcctaggactgtgcagggattggtacaggaaataatctgtgattattgtaataaggctcacaactcaatttcacttaaccttctaaagggaaataaaggccaaaaataaaaaaaaaaccctatcacattattcctcaatttaagagaatggaactatgatcaaatcaacgtgtgcattaagttaaaaaatgaaagtaatatttttaaaagtctgtaacttgtaagaaatctggaaatgctttaaatacattaatagaagggcaggggaatacgtcatatcaaagattaggagctcatataaagacttttgcatccatttcataaagtaaaagaagcaaaagtagggggaaaaagtaggcaaaagattgttcaagtgagaacagggaagacctcaaagtgtgacaggtcaggtgtaaataaggagccagtccggctataaaggaattcaagacacagcacaaaaaggactgcaattcagaaataaaagcgtttttatacatgaaagatagaaggtcgactggagaatcaatgagactgcttgatgatcagggtgctcacggggaaaaaaggagatctggaaactcaatgaattcttcactttggtctttgttgaaatgtagaactttccactgtcatcatgtcttttgaagcaaagaggtgaggtatgtagtattagatcaaatagtgataagggaacaggatgttctgcctgattggcctgatggatataagtaaattgctgaaactttatgacatccattatgagggtctgaagaaactcaagggaataaatggatctaaatgtgaaataagttattgcactcactcttcagtattagtgaattcttgtttacattctaatgaaacctactgaggagaccctacaatctattgactgttgaatctcattcatattagtaaactccagaaattgtaggatcattgaccattttgtataatgaatggagaaaagcatcctgttttttataatatacttgagctatttgaaagggtaaacaagcaccaggaaaaaagcaagaaacaatttgtttagactttcaaggagtcaaaaagtttcacaatgctattccaaattgtgttaccatggtattaggagggaaatttcaccacaggtaggtattaatagagaaaaaaaaagtgtagaatgtatgcgcctgctgttgagggagatgtgtaaacagtgaggtccctcttgggatttctgctgggcctctttattaaacatgtttatagataatctgaaagggcaggcacacaatgaagtttctaaaggtacaggatttaagctcttttggccagtaaaattataaatcaactggaataagcttttgaaagatggcataaatggacaagaaagtggcggggaggatccagtactgtgagaagtgctacctatttagggaaaaagaaactacactaaacttgtaaaattgtgggctgtgaattagttagaaacctggtttcatttaggaaccaggaaaggagttcagaggcattaaagatgcatccttctgagttggccagcagaatgctggaaggttctgaaaacaaaagtacagttgaagcaaaaccattgtgcctgtgcattcttttggttttgatgggcaaatattaaaaaaaaagaatggggtatgataaggacctggtttcagatcctgactcagtccttaaagggatgttctgaggaccaaattaaatacatgtgaatgtgcctgcacatgtggtgcagtggtacatgtcaagtcttgaatacagcatctcagaatggccatgatgaagtcatcctcctagttggaggaaattaatcaatctctcacctggcaggggaagcccctgagaaagtctatggcagatactgatccatcttctctccaactcagccaaagggagacaacttgatttttgaacctctctaattgtcattagtgacctagtagaaagctaactttctgtaattcatagaacaacagaatacagggacgaaaggggacttgagagattactcagaaacctctttcttatggataagtatgagcaatatataggaaaaatcaaagctcagaaaagcaaatgagagacaaattaccagtttgtgaactctgatctttcaatagagtaatcaaccataatatttcctccaggcaaagctacacacccctgtttagttcgtatgattaaatgttgattaatttagagtagggggctctgtggaaagtgcatagaatacttggtatttcatttttgagtctttaaggaaatatctgttatcaatgttgacattttccatttccagcatattagaagttaattgaaggctccaatatcctaaaattactctgtcaaatttctaaacgtgtacttttttttttttgaggcagagtcttgctctgttgcctaggctggagtgcagtggcgtgatcttgactcactgcaacctctgtctcccaggttcaagatattatcctgcctcagcctcccaagtagctgggattacaggcgcctgcccccatgcctggctaatttttgtatttttagtagagatggggtttcaccatgttggtcaggcaggtcttgaactcctgacctcaagtgatccgcttgccttggcctcccaaagtgctgggattacaggcatgggccactgcgtctggcttgtctccaatatcttagaagttggtcttcctcagcttgaaataaacctggtcttgaatatttttctgtttttagacacatggcatataagaaggtttctatgtgaagtaatgactgttggtgaactttgcatgactttaaaaaaaataatctgaaggctatgctctggaggaagttccatagtcatactcttatacacacctctctatcagccttccaccgatagctttatcttaaaatgtcatcctaatttatctgtttattcctggggttattattgttatagttattagaaattattattaactcattaactcaaaactattataattacttatataatgttaatgccatgctaataatttctgatatgtatttaaaaataattaccagcatatcacctcatagcatgtgctggccaagtttatagaacaaattaatcagacttggaacttgaacgcaggtctttgtaaggctgaggaaacagaaatcccattgaaactatatctggtgtttcagttatggaccgttttaggaaaaaataagaaaaacgaaccctagatatctctatagatggcatttcctcaaaactccaccaagaacagaatcctttggccgatctccaaacttgaaaacaattattttttctttctcactcctctaccccttctcttcctctgaacatttttattagttgaaactctttatttttattttattattatttttttttgagatggagtctcgctctgtcgcccaggctggagtgcagtggcgcaatctcggctcattgcaagctccgcctcccgggttcacgccattctcctgcctcagcctcctgagtagctgggactacaggcacccgccaccacgcctggctaattttttgtatttttagtagagacagggtttcactgtgttagccaggatggtctcgatctcctgacctcgtgatctgcccgcctcggcctcccaaagtgctgggattacaggcgtgagtcaccatattagttgaaactcttatctgcttttcctcactgccttccatgcaaaccttagacctgttcccaggaggttgcgtattggatattcaacatacttttgtattccctaggtaactgtgttggctccagatggtgaggtacatgctgggttccatggtgccattttattctatttcttccttgctgaaacttgtgaaattatggatttaaattggcagcttaggatgtgtttccaaccacatgagttcatagaacgatgccttagtaatatttttgttagcattatttattagtatgtttattttatcgtggtatttttaagactcttaacatccagacccatcttgaccttgcattgtgtagcttcattatcagcttttactaccgatcctatccttgggcttatttatttcattttcgatattgcaggggtgggcaaactagggcccatggatctgtgctgattttatgtgacccatgagctacgaatagttttctcacttttaaatggctgaaaaaaatcaaatgaagaataaaagtttttgacacgtgaaattcaaatttaaaagtccataaataaagttttatttaaccacaggcatactcacttgattatatattgtctagctgcttttgtgctaaaataacggagttgagcagttgcaacagagattgtatgacctgcaaagctgaacatatttatcatgaaccatttacagaaaaagtttgctgacccatgctttagagtatcttcaaagaccccaaaaacatcactctgtatcccttcttgggctttttcctcctcagagattttgcttgaattctacttttatgattttgaaaaatttccctttcctctttatgtaacacatactagcatttgattgattgtatagttcttcagtagttttatgtatattaaattttgtgatttttaaaaaaatgtaacgtttttgaaagcaggaaccgtataaagtgtttagcaactcagcattcagccaaggattaggcacatagtattcgattctccgtaggtacttgctaaatttaatggaattcctttatgtggggtcccccagagttcatataaggagccacaatcaagaacagaatattaccatatacaaataattagcagctttaattgtggtttctacagagaactctgggagcccagatgagcataagaagtaaaatttgatctaaatcttgaagggagaatagaagtttgagaggaaaaaagggaaaagggaaagagtgcttgagcattccagtcagagggtttgagtgtataaggtatggagggaagaatgtatccagatgacctctcagtccctttcctcccctacggagggataaacactgtcctaaatctggtgttgtcaatgtcacaaatatttttattcttgtattacatatatgtatacctttaaacaatacatggtatcattttgtatgtttttaaacttgacttatatagtgccatactgaaacatcagtctgaaaaatgcttttatttctttcaattttttgagtttttatgaatttcatttttatgacttttatgtatgttcatatgtatagttctaatacattctttgttatgcttcacattattccattcattcagtatggcaccatttgtttgccattcacctgttgaatgatttttaggttgttttgcaatttttatttttgtaaggttgtgtttttttaattcatttgtcttaaatgatctgaaatctatatctgagagtagaattgctgcatcataggtatgtatatattcaattttgcctgatattgatagaaagtaaattatatcactaggttttctaatattacattgtctttccattccaaggattacctattagttataatgtattgtttttacatgtttgtagattcattttttcctatcattttatataggacttttacatctattttgaaaaagaaactggctcagatctttcttttcctatattgttcttgtttgtttttgtttttttttatattaattttttgtacatgtagagttctttagtggttgtttctgagagtttggtgcaccaaagacttaaactctggttttcatgttagtttagttttataaaatgagatggagaataaccatcccttttctattctctagaagattgaaattatctgtatattaaaagcttggtagagataatctgttaaactgtataggcctagtgggttttgaatggatagattttaaattatacgtctatttattttcaagtttaaaaattatacaggctttccatttctaagtcaattttattgactgtgtttttctagaaatttgcccacttaatctatgaatgtatttaatctatgtatttaaatttttcatagttttttctttttcataaagttttcttccataactaaaaaaagtctattatattcattattattttcttttcattcctaacagagagaaaattacaacaggatagggaatataggtacagactctgtagccacattatctgggtttgaatctagccttcacagttttctggttgtgtgatcttaagaaagttatataacttttctgtgccttaggtcctcaattgttaaaatgacaataaaataacatctaccttattggctgaacttagaactttataaacataaatatatgtttgcagacatacacacacactgttgttacgagctatatgtgtcccccaaaattcacatactgtagcctgtatttggagatgggtttctaagaaagtaattatggttaaatgacgtcataagggtggagccctaatctgataggattagtgttcttccaagaagagacactagagagttctctctttctccttgtacatttactgaggaaaggccatttagggacagtgagatggcagcctggaaaaatgccctcaccatttgccaatcagctggaacgcgattctcggacttgaaccttcagaactatgagaaataaatttctgttttcaaaagcacccagtctatggtattttgttacagcagcccaagtacactaacacagattatggtactgagaagcagagtgttgctgtaacaaatacctaaacatctggaagtggctttggaactggttgatgggtagaggctggaagagtttgaggtgcatgacagagaaagccaagattgccatgaagcaattgttggtagaagtatggacattaaaggcacttctgctgaaggctcagaaagaatgaggagagctggagattatgccttcattttcttagagaatacatagataatctcgaactgaatgttggtggaatgtaaaatccattgtggtgaggcctcacaaggaaatgaggaacaggttattggcaagtggagaaaaggcaacccttgttataaagtggcagataacttggctgagttgtcttctagtgtttttgtttgtttgtttgtttttaagacagaacttgcaagacatgaaactggttatttagcttgagagatgtcaaaacaaaatgttcaaagtgtggcccatgtcctcctgaatgcttatagtaaaatgggagataagatagatgaattgaagaaaaattgttaagcacaaagatactagagttagagatttgaaaaattctcattctgtccctaatcaaaaaatgagaaagcacgttcagaagaggccagtgttatagtgacttatttccaacctctagtttatgtgccatctttccattaatcaacatagtttagttatagctgttgatcccactgtgaatcaatttgctagctttattaatcaacttacacaccatatatattgcactgcaggatattgtgatagacatatacaaacacctcttgaaaatctgttcagatcatttatgatatttcgttgttctagttactcatgttgttacttgcattccataaattagtatgtaatttactagagtgaatgtaaaaattatgtctgcctagcattcttttcttgggaggtacttttccctcctccattttataagcatatcacttggtacatgtgtttcaagggatgggaatgaccctaccccttgtaaggttttgaggggaaggcaagggtaaaagagagagctggtggctcaacagcaacacaggtttattgaatgaagtcctgcacgggggttgcggggagacagcagctagcgctggagcccacccccacttacagactggggtaattataggtccaggcgggagaggtctgggcttgttgcaaactggggtgggcggtgtggttagctgctgataaaggaggaatttcttgcagtcaggtggttagacctggcacttgtccggcaggatatttctcatggccggagctctagtggaattttctgctctgaccagggtctgtgaaatggtaagggtttacaaaatggtgcagcttgggctaacacctctgaccgtctatgccaagcaggtcttgtgaatgagtcccgttagaatccagtccttcctagggtcagatgattggtgtgggcataggcatatgatctcagctgattttctggatccatccatgacaggagctggagtacctttgaactcatcaagtctgtgagccaatacacttgactcacaacctctccactcccccaccttttttgtttgggttagtttgagttaggcatctttattttaggtctctgtctgtcctttcatcctttcatatttattatgcctcatcaatgttatttttgctccttttcttcttcctcattctggaagaagtttttagatttgtcctgcatataacttaccccattttctgtaatgctgaattttactcttttacccttgaaatccatcgtattcttgtctatctctattgtaatttcttttgacttctcagttagtgctgttgtttcataatctcatgtttgatttcatatttaaggaagaacatatttccctgagttgttttgagtggataagcagacactttttataatttgcttctttccctacatagatggttttgaaattcttgtttttttgctgcacctggaggactctgttctctttcttttatattgtgggatatttctataggtcttttccaccctccttctgtatatcctcactgaatgagttctcacgtatattggctgatgtttgctggcaaacaatggtaagtaataatagctttgcttgtctttaatactcatcactatttggttgctgttcaaagtgcttctcttaaatcttaatgtgaaatactcattgatacaaatttagattcagaaagctttacaggagtgtgcaggctcatcaggggaactatgtctcttgatttttccttcccttttgatacatttgatttggccattgcttcagtgactaacttactttcctttttgtctttttttgtaacagagtcttggctctgttgcccaggctggagtgcagtggctcaatctcagctcaacttcagtgactaactttttacacttgacactataatagtccttatttcctagtacaaactggtcttttgtctggatagttgagtctagtctttgtcattctgtttcctacttggtgttgtcagtgcacaaattctggggccctctctaagatccctgtgttcaactacttattctcagttacaaaatagaggttttgccgcttgctcctcacctggtataccatcactcattcctctaagaagttcttcttatatggttttttttggaggcagggtttcactctgttgcccaggctgtagtgcagtggcacgatcatggctcacagcagtctctatctctcgggcttaagtgacccttttacttcagcctcctgagtagccaggactaaaggcataccaccacacccaggtgattggtttttattaatatttttagtagagatgagggtgctctactaatgctacattgttcagtctggtcttgaacttttgagctcaaacaatcctcctgcctcggcttcccaaagtgctgggattacaggtgtgagccactgcacccagcttttcctatatttttgtcaacatagattttttacctgtatgagttatcagtggacctctggtgatttcatttattttggttcatttagaatatacctagcagaaaatctgtagcatttctgctataatatcctttattctaatattgttctttttaaaataatttcatataattgatatatgtcaattttaatattaaagataatactttttatgtcatctttgtacttattacaatttgatttttaaaacttttcctgttttgtaagtgaatcatactcattactatatcttatttatttatttatttatttatttatttatttatttatttattttttttaagagagtctcactctgttgcccaggcaggagtgcggtggcacgatctcagttcactgcagcctctgcctcccaggttcaagcgatttttctgcctcagcctcccaagtagctggaactacaggtgaccaccgccacacctggctaattttttttttttttcttctttttttttcttagtagagtcagggtttcaccatgttggtcaggctggtcttgaactcttgactttaagtgatccacccaccttggccccccaaaatgttgggattagaggcatgagccaccgtgcctggcctattatatttagatttttaaaaaaattatactttaagttctggggtacatatgcagaatgtgtaggtttgttacataggtatacaggtgccgtggtggtttgctgcacccatcaacccgtcatctacattaggtatttctcctaatgctttccctcccccgcaacccccccgacaggccccagtatgtgatgttcccctccctgtgtccatgtgttttcattgttcaactcccccttaggagtgagaacatgcggtgtttgtttttctgttcttgtgttagtttgcggagaatgatgggttccagtttcatccatgtcccagcaaaggacatgaacccatccttttttatggctgcaaagtattccatggtgtatatgtgccatattttctttatcctgtctatcattgatgggcatttgggttggttcttaatgattttgaatgttttttctaatttcttaaatatttatatataatgagttgtgtatatgttctttattgctgtgtaagccttcttaagaactctttgtaggttgataacattatgcccaactcatatttgttttgactagtctttctcagtttgtgttttaattttatttctgttttcactgtgtctaatattatgtttaagtatcaaagttaataatttttctttcatgacctcttttattgtgtttctgctttaaaagtatttaccatcttaaaatctaaaaatggatctcttctggatgaatttttatgatttcacattaaattattttatatttttattttttctctttttaataaaacaaacttcctaattccttgagtggattatttatttaggaatttagcaaaatgtacttataatagtgtgattgtattgttttcactactcttataagattttcaaggcctttataagcattatcccattaattcacataatacctttttgggttaggtaataactgtgatcagagttccacataatgtttttagaaaatctctagaatgagtaaagcttaattttgtcaataaaacatttataagcactcttcaatgactagctgacatcacatttagagtttggttaaaaactgttgtatttaatggcaactttgccaacttatctatgtttttgtcttcattttttaatctgtggaaaatttgctactcttgtatggctttctcaaatgatatatgtggattattgttgaagaaacagagaagagtttaaattttagattagtgcttctcaaccctagctgcacattagaattacctgagaagcttttaatgcaaagttaatgtccaagtttcacctccagaaattaatatttaattgttctttggtgttgctgggcattaagagttttgaagaagcttctgttatgcacccatggtagaaagctattattttgcatcagtggttttcaaaatgtgatccccagatttgctgcatcacgtgagaacttgagatgtaatgaaatgtaaattatcagaccacatctcgatctgtctgctttttttcaaaagaattttttgttctgagataattgtggattcacatgtaattggaagaaataatagagatccattttcaccagttttgcatgcatttgtgtgtttgtgtgtgtatatttacttctatacaattttttttagtatatgtgctgccaaggtgagcactacaatctattttttttaatgttttattttagattcagtggtacatgtgcaggtttgttatataggtaagttgtgtgtcactggagtttggagtacagagtatttcaccacccaggtacccaataggtattttttcaatcctctccctcctccttccctctactctcaagtaggccctggtgtctgttgttgcctttcttgtatccatatgtgctcagtgtttagctcccacatgtaagtaagaacatggcggtgtttggttttctctttctgtgttagtttgcttcagataatggtctgcagttccataaatacatgattcattcttttttatggctgtgaaatattccatgctttatccagtctaccattgatgggcatttaggttgatcccatgtttttgttattgtgagtaatgcgatgaacatacgcgtgcgtgtgtctttatggtagaatgacgtatgtattcctttgggtgtacacctaatagtgtgattgctgggtggaatggtatttctgttttgtgttctttgagaaattgccaaactgctttccaccctatctgaactaatttgcattctcatcaacagtataagtgttcccttttctctacaactttgtcaacatctgttattttttgactttttaataataggcattctgactggtgtgagatggtaactcattgtggttttgatttacatttctctaatgattagtgatgtttagcactttttcatatgcttgttggccacacgtgtcttcttttgaaaagtgtctgtgtcctttgcccactttttaatggggttgttttcagatgtctactatcactaaagtcaagatacaggatgcaacaacaatctgtgtttcaccaagttttcgggtgactggtactgctaaggtttgagaactatttaaaaaataagactagaagagcaggaacagactttttttccccaaaaggattagtctaaatacgcaaagggtactcatagaccagcagcatagatctcacccaggagcttcatattactgtagaatcttaggtcccatcttggacctaatgaatcagagttcacattttaacaggatcctcagataatgtgtgtacatattgaagttgaagggtacctgattaaggggttaaaatatgcaaacaaacaaaaacaactaaatcagttttccgaaattgggtttaaatatttattctcacagtaaatacctttcacgttgaagataatttgtcttttaataaagataattttagtgttgaagcaaaactaataccattttctgtgctttacatctcattttagggtcattatggtgttattttttgctgatggagttgggttcttaaaaaaaccatatagatatgcaagttgagattttctatcaattagtcttaatattacaccatcttaagtaccgaaaatatgacaagtatcatcagtttcatcaacatcaaacttaaatgtgtctgaattttttcatcaacttttttttccacttgtcacttacttctgataaaattggatatactgggtttgtttcaggctcctgtagcagttcatctggtaactatcattattttctgctttcatttttatggcatttggtttgagagtctgagaaagaattttaaagaaaaagtgcaacattgagaaaaacagacaagagaccgggaagtagcctttttaatagatagatgtattagtttaggctattttccaattctgttttgcctccccccgcaacaagtaataaatgaacacatttataattatttttcttcttccctcccttcttttcacactgtgtaaggtggaagggagtttctggcttaaccaggggaagagtattgttaaataaggcttcaaagacatgcagaaggctaaataagaatttgtgaggtggatttattggttgcggggcagtagaatacagaattcagtgctgatagttcagattgaggtattacatacaacagtgtgggcagagggcaaaggagggatggacggagaggtgggaaaagcagggatctgtcacctcgccatacagccaaagggacaagaaggaaatgtacttcctggagccagtaagggaactgtggaggagaggccacctggttaaagctgtggtcatggaaggacctacctggctgcttcttgagatacagtgcccacatgagagggagccacaaagaaattcttctatctctttttcttcccagaggtgaaatctaatgaaaagttggctgggtattgcagtttgtgcggtcactgtcaagagcactgaataaagtagagaaggctgaggatagatggagtttagggtataaaataaaataaccaggagatcagagtggaatgcaattccagagagaatgaatattatgtgctaatgcacagaaatgccaaagattggcaactgtgggaataatgaggagtataggaagcaggaaatgtgaaagcaaagtagtagcaggagatgaggctggatacataacaataataatagttaatacttttggtgccaagcacttggctaaatagtttacataatttcagtctacacattattatgaggttgaccctatcatgtagcaattatgactcttgtccacaaatgcatatgcaattttttttttcttacattgactcagatttcattctgagcctttacctcgtattgggaaatcgtacctcagtcattagtttggctcctgccttctccatagagttccataaaactccaggagatttgcagggtgaccagatgaactgggaaggactctaatctctaggccaccagattctgccaacctcctcttcgttactgatagtggtcacttgaaattcctggattcttgagccatgggaaggacactggagtgttttcaaaggctgtgagccccagtgggttaggtgtccactccctttgtatgttttggtttatcattcctaatgtcataaacttgtcagaatctttttataattgacttaggaggttcatcatatctcattcatctttcagacatttatgtcaatcaaaacctatgacaatttcttactattatgttttgtaacctgtaggtaacctttgtaaccttttgggcaatattaaccatatatgctccttagagactgtgagatgttcccttttacaaccaacccttttgagcaggagttggcagacttttttggtaagcagccatatagtcaagaatttaggctttgcaggccaagaggcaaaactgaggatattatgcaaatatttatgcaataagagaggaaaacatctcacaaaattttaagtgattaaattaaagaatataaaataatttagtattatttataagacagatttactaatgagaagaatggaattctttttttgggaggattatatttcacttcattcaggtgtaaaattagtgttccctatcattagaattgatttcaaatgtttgtctcttaatgctgatctgtaataagaatttacatatttcatctttgaaaatgtcttttcacgcagaaaggtgctgccaagtagttatatcaatccacagcatatgatttaaattgagcatgttcattgcctggaaggcatttctagaatttattagacttttctcttgatattttccttttacatgtcattacattgcagattaatcacttccaattgaaagttaggtggaaattcctcagttgctccgttaaatggattttgaaatatggaaatttcctttgcacttgcatcaaggtctgaagaacactgttgtagcttgagttcagaaaatatatctgctccagattcatgtgggaatggaaatctcactttttgttttatcttctgacagcgcaggaagtatataaaacagcttggcataactcgtgattcaaacaacattagttgtcatcgaaatgactttaccgtcataaaagttttgcatgcaaatgctgttttgccttgaaattttagattgaattcattaaacatattgtcaaatccgcaggaaaagccaatttccaaagctatttaatgctcaatgatagtggttgaggatagattttcttactcagaaaaatttcattcatgatcctgagctcaaacaccacacctaagtttatccctattacaggcatggaagtgctgtgtagtgagtggagtgagtcagaatattaaacttctatttctgagaaaacttctaggactaactggctaagcctatcagagcaaaacatattttctgaaaagtacttgctggtgaataatacgatgaataaccataggctctgaacaccttcctctgtaaatttgtccaagtcaccctctgctccatacataactttttgccactctaaattgtaacacattttagcagactccgcttaagttgttttgaattagtgttttcttagtttctttgaaaatacttgtttgtagttgttctgtgcagtctattcatagaaactaattcttcagcctcttcaaaatcagtactgactccttgaaagaacaactgaacagtatccatcacatctgttagcttatcaaaagctgaggaaaaccacacaaaataatttgccttattttcaaattgactattgatattgcttccaatgtcttcaactctttgaacaactgtttttactgaaagattaatatttctaaacaaatttattttctctggacacatttctttagctgctgtaatcagacacaatttaaaatgactcatcactggtaaatggttttctttgcttggctcaaaaacgaaccactcagaaacttactttggttgcagtcttatttttattttttaatttttgtgatgaaattctgctgttttaagatagtgtgttttaaattttataatttttctgactattgctttcctatgagttgggaatattttgatcagtacccaatttggcagttattgtctccctttagcacagctataatgtcattacataataaccaaaatgctttgtcacctaatttaattaaaaaaattcatcttccaatgtatgccaacatctagcatgatgaagtccatttgtcttctcttttcttcttttgacatgattggtatgcattgggaagattaaaaaaatgtgaccctaccacatgcgtgacactgtcgattttgttgagttatgattgtgtcgctgtgatttgtggtgcatcaaaaagatgtgcaaagcaataagcatgagaatgcgacatgtggtctcggtcacaactactcacttctgctgatgtagggcaaaagtagccatagatgtaaacagaggaatgtggctgtgtttcaataaaacttcagttatgaacactgacatttcaattgcatgtaattttcatgtatcatgagatatttttcttttgatttttaaaaatttatcttttttcttttttcttttcttttttgtctttttaaaatcttttttcttttttttaatcttcttttgatttttttaaccatttaaaaatgatttttttaaccatttaaacatgtaaagaacattcttagcttgtgggtcatccaaaaatggacagcaggctgaatttggccagtatggcgttgtttgctgacccctactgttgagaatcattgatctatgatgagtagaatgtcaaagacaccaaaaaataggtcctgctttaagacttggcacataagaataggagacttggctattttgtttcccattaaatccttagcacatagatgcccaataagtagttttgaataaggcaattatagaaaacttctggcacataataaacctaaaagatctgttccatgaatgaaatgaatgaatgatatgctgtctatcctacacaatatgtgggagcttaaagatgatgggttaaaaataaattgtttaatctgagagaattcaaaaatagggagaggttatacctgaaaagcatgaagtgtttagtagctgggaatcattatggccaggttattaagtaataatagctggagagcatattattttgcgtaactaagatgtgagaggagtatagtagacaaacacaactctctataggctatttctatgaggctctttataactaaattgctttaaaaagttattcagagggccgggcgcagtggctcatgcctgtaatgccaacactttgggaggccgagatgagtggatcacctgaggtcaggagttcgagcctagcctggccaacatggtgaaaccgtgtctctactaaaaatacaaaaaattagccaggtgtggtggtgcatgcctgtaatcccagctactcggaaggttgaggcaggagaatcgcttgaacccgtgaggcacaggttgtagtgagccgaaattgtgccactgcactccagcctgggcaacaagagcaaaactccatctcaaaaacaacaacaacaacaacaacaacaacaacaacaacaacactactattcatagaaaatgacagaattttcgacaaagaaagaacttaaaaccaaagaagctagtagccaattgcattttccaggaggatgagctccatgttaggatattttaactatttaataggctagactatttatacaacatcccccaagttatgtatacttccaggcatgtgttatatctctcaggcataggtaactgtgggaaatatgattgttagccaaagatacattttacactatgtttacaaactcacttagattgcatgcaaataaagaatttggcaagtttttagtcatcacttttggcatggggctgttccctggatatggactgttttatcaactcagaggcatttcttattccagcagcattagctttatgttctgtcatgtatgtatgtatgtacatgtatgtatgtatgtatgtatgtatatttttgagacagagttgtatgtatatttttgagacagagttttgctcttgttgcctaggctggagtgcaatagtgctatctcagctcactgcaacctctgcctcctgggttcaagccattctcctgtctaagcctcccgagtagctgggattacagacatgtgccaccacacctggctgatttttatatttttagtaccgacaggatttcatcatgttggtcaggctggtctcgaactcctgacctcaggtaatctgcccatcttggcctcccaaaatgctgggattacaggcgtgagccactgtgcctggcctgttctgtcatttagtacagtaagactggacctgacgtggcaatatcagtacaagtttcatggtaactcttgtttacccccatgatataagagtagagaaacacccacccaaaggaagggtataaagagaacgattgtcaaactgcctttctcacgtcctaactgtgttgttgtaggtaaggtgtttacccttctgaaccttcatttcttcccctgagaagttgtaatatgatctactttagagctagattgtggagattaaatgagacaacatgtgtcaactgcttagcacagtgttggagagtggaaatggtagctattatttacattaaaatgacagattttatactttaatattttaaaatttaaaatgactagatgactgttgtctctgcataatacaagctcattatggacaattttattggtaactacttacaaatgttagagaaatgacctgcagccttttattacccactgcatagcccatgagtctgctgtgcatgtgtgtgcaagattttatttttgagacagagtctcactctgtcgcccaggctggagtgcagtggcacgatctcggctcactgcaacctccgcctgccaggttcaagtgattctcctgcctcagcctcccaagtagctgggattacaggcacccgccaccacacctggctaatttttgtatttttagtagaggcagggttttgccatgttgcccaggctggtctagaactcctgatttcaagtgacccgcccgccttggcctcccaaagtgttgggataacaggcatgagccactgcacccagcctaagatttttttttaaaaatactgtttttcttctattctacctttgtttgaagagggttaatgcaaatttcattgagatttgtgaagaaggaatacaattcattcattgatttattaattcatgatttcaacaaatgctgagcaccaacagtgtgccaagcgctgggtctacagtgaagaacaagcaattgcctctgcccctaagcagttcacttgcacctagagagaaagtgaaggtggtgatggatgcagtaacagagtaagtgcactgtgatatggccatgcgtggaaggcactcctaaccccgttgtgggagacttgagatttcttagaagaagtaaaatctctgttgaaggcaggtgaggcagagatgaagggattggactagcatgagagggagcagtgaatataactggagaggtttctaagggctttgtaaaccatgttatgaaattcaaacactatcctaagggcaggagagagcctctgaaatgttttaggtactcaaagacatttgtgtttagaaatattaataaaattttgacaatagtgtggaacaagcaaagattgtgggccaggagaccagttaaggggctgttacagtactctaggtgcaaggaaatggtggctatggggatgaagagacagcaaacaggttcaagatctattaaggagttataattgatattgcttaatcaataattattagtgtgaatgttgaaggagtagatgatgattcttaggtgttttacttcagccactgggaggatgttattaggaaagatgagaggaggagtaggttgtgtctggagaaatgagggagtaatgactttacctatagactgatttttctagtgctatgggtgcttcaaatggagatccttctgtatgagttcagtttcccagtcagcagtctaatctgctctttaggataccaacaaagcacaggcagctcagccctcaaaaagagagaaaatttggtcaggcgcggtggctcacgctggtaatcctagcactttgggaggctgaggtgggtggatcatgaggtcaggagatcgagaccatcctggctaacatggtgaactcctgtctctactaaaaatacaaaaaattagccaggcgtggtgacgggcacctgtagtcccagctactcgggaggctgaggcaggagaatggtgtgaatgcaggaggcggagcttgcagtgaactgagattgtgccactgcactccagcctgggcgacacagcgagactccatctcaaaaagaaaaaaaaaaaagaaaattcaaacactctaggaagaagtgatttaaatttcaacaaaattttcagttttgttttaatttaaaaagcaagcaacattttattttgtggcttactgtagtgttttggtatttcgatttttgaatgataaaggcagtggtaactggagatacagacttgggagtcactggcataaagatagcaattgaagtgattgagtgagatctcagggagggatcaaagagcagtcatggtttttttttctgagggcacattggaatcacatggggatcttaagaaatatcctgatgcctgagacccatcgccagagattctgatttaattgctttaagctggcctgggccaaaatttgagaagcactggcttagagtgagaagaaattacaggaaagaatgtgaggggatcacaatatttaaatgtcaatccagagaggactgtaatacacgtaggccgccaaggagttcaaggaaagaaaactctttagaacatcaggtgtggctgcatcaccttcttgattcagatgattaagaagttcaaccatgcccggcgcagtggctatcgcctgtaatcccagcactttgggaggccgaggtgggcagatgacctgaggtcaggagttcgagaccagcctgaccaacatggcaaatccctgtctctactaaaaatacaaaaattagctgggtgtggtggcgcatgcctctagtcctagctactcaggaggctgaggtaggagaatcacttgaaaccaggaggcagaagttgcagtgagccaagatggcgtcactgcactccagcctgggtgacagagcgagagtccatccccgccgctcccccctcaaaaaaaaaggtagttcagccaaccaaccaatcaatgtaatccttcagtgtctccagcaccatcaacctgctgtgattaaagcttctggtgtgagtctgcatgctagagaaggaagcttgggtaaagatataggtatacatagttatttttctctttgacagtactatatagctgtaagtattaataatgattatatccaacagagaaggaaagttgaaagtggaagcataagtttggaaacaatataattttaaaaattgagatataatgatataatttatatattataaaatcagtcctttgaaatgtacaactcagtggtttttttgtatattcacaagtttgtacagctatctctatgatctaattttggaaaaaaatgtagtcttgatctatatggtgtgattagaatgtggcttttagccattctatttctaaagtgcaattttgtcttatagtatatgaaatagatctaattttaaaaatcagaaggaaaaatgcaaacaaaaaaatccctcaataccaaaaccccaaataacaacccatttttaaaatggctgttattggtctattcagagattcaacttcttcctggtttagacttgggagggtgtatgtgtcgaggaatttatccatttcttctagattttctagtttatttgcatagaggtgtttgtagtattctctgatggtagtttgtatttctgtgggatcggtggtgatatcccctttatcattttttattgcatctatttgattcttctctctttttttctttattagtcttgctagcggtctatcaattttgttgatcctttcaaaaaaccagctcctggattcattaattttttgaagggttttttgtgtctctatttccttcagttgtgctctgattttagttatttcttgccttctgctagcttttgaatgtgtttgctcttggttttctagttcttttaattgtgatgttacggtgtcaattttggatctttcctgctttctcttgtgggcatttagtactataaatttccctctacacactgctttgaatgtgtcccaaagattctggtatgttgtgtctttgttctcgctggtttcaaagaacatctttatttctgccttcatttaattatgtacccagcagtcattcaggagcaggttgttcagtttccatgtagttgagcgattttgagtgagtttcttaatcctgagttctagtttgattgcactgtggtctgagagacagtttgttataatttctgttcttttacatttgctgaggagagctttacttccaactatgtggtcaattttggaataggtgtggtgtggtgctgaaaaaagtgtatattctgttgatttggggtggagagttctgtagatgtctattaggtccgcttggtgcagagctgagttcaattcctgggtatccttgttaactttctgtctcgttgatctgtctaatgttgacaatggggtgttaaagtctcccgttattattgtgtgggagtcttaaatctctttgtaggtcactcaggacttgctttatgaatctgggtgctcctgtattgggtgcatatatatttaggatagttagctcttcttgttgaattgatccctttaccattatgtaatggccttctttgtctcttttgatctttgttggtttaaagtctgttttatccgagactaggattgaaacccctgcctttttttgttttccatttgcttggtagatcttcctacatccttttattttgagcctatgtgtgtctctgcacgtgagatgggttttctgaatacaacacactgatgggtcttgactctttatccaatttgccagtctgtgtcttttaattggagcatttagtccatttacatttaaagttaatattgttatgtgtgaatttgatcctgtcattatgatgttagctggttattttgctcgttagttgatgcagtttcttcctagtctcaatggtctttacattttggcatgattttgcagtggctggtaccggttgttcctttccatgtttagtgcttccttcaggagctcttgtagggcaggcctggtggtgacaaaatctctcagcatttgcttgtctgtaaagtattttatttctccttctcttatgaagcttagtttgggtggatatgaaattctgggttgaaaattcttttctttaagaatgttgaatattggctcccactctcttctggcttgtagagtttctgccagtagatccgctgttagtctgatgggcttccctttgtgggtaacccgacctttaaaatagaccaataacaggctctgaaattgtggcaataatcaatagcttaccaaccaaaaagagtccaggaccagatggattcacagccgaattctaccagaggtacaaggaggaactggtaccattccttctgaaactattccaatcaatagaaaaagagggaatcctccctaattcattttatgaggccagcatcatcctgataccaaagccgggcagagacacaaccaaaaaagagaattttagaccaatatccttgatgaacattgatgcaaaaatgctcaataaaatactggcaaaccgaatccagcagcacatcacaaagcttatccaccatgatcaagtgggcttcatccctgggatgcaaggctggttcagtatatgcaaattaataaatgtaatccggcatataaacagaaccaaagacaaaaaccacatgattatctcaatagatgcagaaaaggcctttgacaaaatttaacaactcttcatgctaaaaactctcaataaattaggtattgatgggatgtatctcaaaataataagagctatctatgacaaacccacagccaatatcgtactgaatgggcaaaaactggaagcattccctttgaaaactggcacaagacagggatgccctctctcaccactcctattcaacatagtgttggaagttctggccagggcaatcaggcaggagaaggaaataaagggtattcaattaggaaaagaggaagtcaaattgtccctgtttgcagatgacatgattgtatatctagaaaacccctttgtctcagcctaaaatctccttaagctgataagcaacttcagcaaagtctcaggatacaaaatcaatgtacaaaaatcacaagcattcttatacaccaataacagacaaacagagagccaaatcatgagtgaactcccattcacaattgcttcaaagagaataaaatacctaggaatccaacttacaagggatgtgaaggacctcttcaaggagaactacaaaccactgctcaatgaaataaaagaggacacaaacaaatggaagaacattccatgctcatgagtaggcagaatcaatatcctgaaaatggccatactgcccaatgtaatttatagattcaatgccatccccatcaagctaccaacgactttcttcacagaattggaaaaaactactttaaaattcatatggaaccaaaaaagagctcacatcgccaagtcaatcctaagccaaaagaacaaagctggaggcatcacgctacctgacttcaaactttactacgaggctacagttaccaaaacagcatggtactggtaccaaaacagagatatagatcagtggaacagaacagagccctcagaaataacgccacatatctacaactatccgatctttgacaaacctgacaaaaacaagaaatggggaaaggattccctatttaataaatggtgctgggaaaactggctagccatatgtagaaagctgaaactggatcccttccttacaccttatacaaaaattaattcaagatggattaaagacttaaacattagacctaaaaccataaaaaccctagaagaaaacctaggcattaccattcaggacataggcatgggcgaggactacatgtctaaaacaccaaaagcaatggcaacaaaagccaaaattgacaaatgggatctaattaaactaaagagcttctgcacagcaaaagaaactaccatcagagtgaacaggcaacctacaaaatgggagaaaattttctcaacctactcatctgacaaagggctaatatccagaatctacaataaaatcaaacaaatttacaagaaaaaaacaaacaatcccatcaaaaagtgggcgaaggatatgaacagacacttctcaaaagaagacatttatgcagccaaaagacacatgaaaaaatgctcatcatcactggccatcagagaaatgcaaatcaaaaccacaatgagataccatctcccaccagttagaatggcagtcattaaaaagtcaggaaacaacaggtgctggagaggatgtggagaaataggaacacttttacactgttggtgggactgtaaactagttcaaccattgtggaagtcagtgtggcgattcctcagggatctcgaactagaaataccatttgacccagccatcccattactgggtatatacccgaaggactataaatcatgctgctatgaagacacatgcacacgtatgtttattgcggcactattcacagtagcaaagagttggaaccaacccaaatgtccaacaatgatagactggtttaagaaaatgtggcacatatacaccatggaatactatgcagccataaaaaatgatgagttcatgtcctttgtagggacatggatgaaattggaaatcatcattctcagtaaactatcgcaaggacaaaaaaccaaacatcgtatgttctcactcataggtgggaattgaacaatgagaacacatggacacaggaagggtaacatcacactccggggactgttgtggggtggggggagggggggaggaatagcattaggagatatacctaatgctaaatgacgagttaatgggtgcaggacaccagcatggcacatgtatacatatgtaactaacctgcacattgtgcacctataccctaaaacttaaagtataataataataaaataaataaataaataaattacccagaaaaaaaaataaaataaaatggctggcactgcgatattcgctaaaagtatatgaacttactaaacaacacctgtgcccctcaaaaaacacttaatttttttttctgagaaaagaaatgttattttacttccgtaaaaggaaaaccagcaccacttgccagaaatagtaggtaagagcaaaaagaaatataatagaaattaatgcaatatttaactaaggcaaacacatctgtcctcatctatcaaatctctcttcttatttcctcttctttccacctctgctgcccgaccgtggtctgttatctctcccttagaatattgcagactctcattcttgtctctctgcttccacttttgcctcccaagcgtcatgtcacccaactgattcaaggatgaagacccagcccttaacctggccttcctggcccttgccatctgtcctcacagcctctccatccatgcctcccaccattctcctcctccttcatggcactccaggcaaaccacctgctttcatttcctagatgagtcactcctcttctagcctctaagcctttgctcctgccatgtttccatctccctagagcacttccagcaccccttcactaggaaaagcctacttatcctccagattttgtctctattgtcatctccgaaagtcttccttgacctcttacttcctgcttttccctcgtaagtcagatctcacattataacattttagtctatacttttttattttgtgattatttatttatttatttttgagatggagtgttgcactgtcgcctgggctggagtacaatggctgatctcggctcactgcaacctctgcctcccaggttcacgtgattctcctgcttcaacgtcctgagtagctaggattacaggtgcataccaccacacccagctaattttttgtatttttagtagagatgtggtttcactgtggtggccagactggtctcgaacttttgaccttgtgatccctcctccttgccctcccaaagtgctgggattacaggtgtgagccaccacacccggactattgttcattattaatatctgaaagttcttacttacacagaagctgatatgatcactgcatagacttggaatcttttgtctgcagttgcctcaagctcagacttcaagtacaaagcatcttcattgaacgtatacctaggtctgaaactagttttgactctaatttaccactactctgaactaggcatgaaacctcatgaaatgaaaggaagtccattttcctataatgtactgattttcaaatttggctgatttttagagtaatatggaggccttttgaacatgcaagttcctgggctttaggctcattcaactacaacttttggctgggtgtggtggctgacacctgtaattccagtactttgggaggctgaggagggcgaatcacctgaggtcaggagttcgagaccagcctggccaacatggcaaaactgcatctctactaaaaatacaaaaattagctaggcatggtggcgggtgcctgtaatcccagctacttgggaggctgaggcagaagaatagcttgaacgcaggaggaggaggttgcagtgagctgagatcacgccattgtactccagcctgggtaacagagcgagactctatcttaaaaaaaaaaaaaaattataacttttgagtggggattgagtgtttttttaattagttttccaggtgattcacatgcagtgagattagcactagatggcagagaggcatttgggaactaatacttcaacacatttagcaaaattcttgttgtaattgtcttccctctgctttggaagtggagtggaagatggcaatgaagtagactattattagagatttctctggcttttgtgggaagaagatgacttctaaattgagtttttcttgaagaaactgactcctagttatgtctaccatttttttctatcattttttccttttcacagatcaaatattctattctgcttctgacttcccacacccatgattgcaggagcttgatgtataacgcttaaaacatatacatttgtgtctggccccttatggaatattataatgggctgttgcaagaaggaaggaagttgagtaaaacaatgattctgctccagctctggcccctaagaagggggagggtgcagacatcagtcccaattataccatttaagaggcatgtaaaggttgaatccaatctggattaggattaatgtcagagattccagttgacatgggtgggaaatggcagtagaattactggatggaagccacagagaataaagtgggcctgtggattaggagtccaagcaaagtttattcagttgcaatacatcctaggctcctgctgattgtgtgagtgctttgataggtcatggaaaggaggaaagaaactgctagcatctagcagcatttcagggctctggcaagattagtgaggtttatggtcaggccctagtgctcgtggggaatggtagtatgatactgaagagatttccagttcgaggactcatggttcatgcaatacatgatattgcagctactttgtattagagaaaaatgagacactctgggtatgttggatccttggtttagggcagtatgtaaatatccaagtttacccactagtgggaatgtgtattttgatctactgccagggtcagttctcactggcaatccatgaccgaagcataactttctactaaagttgtctcatcacatctgcgtccctttcctctcagcttaattagtaaagaacgcctagaaaagataggcaaaaaagaaggaagacaacaaaaataagttttgcaagagccagggaaggatcagttttgagggagaatgagtcttcaggggagatctgtagggccctgcactgtagctgctcctctctacacatgtattctcttaactctgccgaacctggatgatcaggagtgatttccctcaaaaggtgtaattgctgatccccccatatgaagttggttgctttgtatgtaattgaggctatggaaggaaaaaacatacctagagatcctcacttgcagagattcttttcatgatgcttaggatggatttggagggcaaaggagagagagagagaagagagagagagatgggggagagagagagaggagagagagagatgggggagagagagagtgggggacagagagagagatggagacagagagacatttaaatgttaaatgtggtatctcttggttttaagatttgggaggatttcctttttctttttttttgcttttcagggctttctaaatatttctataatttttacatattacttcttagtaagaaaaaagtatttttataaagtgctgtaactgctatttgcatttgtgggaaaatataagtgctatttgctttaaactaataacaataggcttagtgttcatttattgaatacctatggtgtctcaagcccttcatcttagttaactctcagtactgttgtacaggatatatagttggaggaactaatgctcagagatattacacgacctggccagactcatgtaactaatggcccagagctagatagtcccacttccaaagaccatgagtgtttctttcatgctaaatgtttttactcatatgaacattaagaaaaaaatgccagaagggaagagtccattttgaccagttctcatctgtttcttacccaattttccctcactttctctcttttttcttagttacttgaaaagagttttttgctgtataagtacccagattggttgctttcagtgactacaaaagttaaatagtgcacaggatgagccagaaactaaaataataataaaaaagctttgcatttgtgttttgtttgtttgtttgatttgtcatttttatttctcctatagctggtgaacccatggtaattggtggtgtcaggtgagggaagagttgaaaagattgactgtgtaatagaaaattggctactaactatcaggaatgcagctgtggagtccggttaaggcaacacatgcttttttgtgcacttcaggttcctaaaagcatttttaaataacagagaaaacaaattcattacatcgtggtttttctactgctgctaactgagcaagatttgggagctttcaaaaatattatacattgtttaaaaatattacaaagaaattttagctttgcacaagagattcattaaatttagcatttttagaagatattttcagtcattaaagacttttggtattgtttccttattgtcttaattgtcactgttcaattagaattaacatcaatattgttctgatcttcgaaaagattacagaaaaactttcacttcatttcctgatataggaagaagagaatcttctgattttcttccatctaatttaaaaatcatgttcactggaatttctttctaatccttttaagtaaacaaaaagtataattattgctttggatgtatgtatatacatctcgaacacacacacacacacacacacacacatctgtataaaaatagtctaggttgaggaggacagtgtgttttttaaacaaaatcaggattatgaaacacatactgcaaatgagagccagggttgtctgtgtgtttttgacatggttttactggtttgaggttttttttttaggtttgtttttggattatatttttttgacgctcttcctgtattcttccaagtccagtaatggaataagagttgaagagctgaaagattcacatggagatgacctctgtgacttcatctgtcaggtgtctgtgtctttattagtcatctggaattttgaagactgattgaggccattacaaaatgtactgcagatcttagaccctacatctttaattaattaatgttagcaaagcactttgcaatcgacgaatgaaactaattgtaaaaatgtactgaatggtttgctctcttttatttttctatttccacatcaaataccttaatttgatttttaaaaattgtgctgtggatactcctaaacacttttttcttttgagctgtttatgttatttacataaagttggcagagaaatatcttctgtagttttgcctttgattttactgggaaatagatactcctgtaggctatagatttatttttcaactgaaaaacaccatcccaatgttgtgttaattattaataggattaatcttttatgtcagtggaaaaatgtctaaaattatgcaggcaagtaaatcatacatttgtagaaactttgaaaagaggaacataaagatcacagagaatgttctctaacagaatggaatattccaggataatgctttctaacaagcaaaggtaatttttatctaaaacaaatatgactgaggagcaggtgcattcttgctcaaataacggaaaagattcaatgcaagtaaccacgcattttgtcctccaataatttataattcaaatccatattgatttgtcatgaaaaggaaattgtaagacaaatatatacagacagaggattattaggttgcaagagccaactctaagaattaagatttgtgctgtatgtaaaaattatatcatatggcttaattgtgtatcatagtagtaattattactaaacaattttggggaattcataggtgaaaattgttgctagtgaagtcagaagaagtaacactatcgtactacaaattcctagaatatgtgatttaaagttcaagttagaaagttaaatttctcttctccttttactttgaagaagttaagtgattctagaaataatgcctatttaattctctgggttttccacttagctataataattaatatatagaattcagaatctatagattctagaaaatttagaatctatagattctagaaaatttagaatctatagattctagaaaatttagaatctatagattctagaaaatttagaatctatagattctagaaaatttagaatctatggattctagaaaatttagaatctatggattctagaaaatttagaatctatggattctagaaaatttagaatctatggattctagaaaatttagaatctatagattctagaaaatttagaatctatgattaatatatagaatttagatcaatgaaaagtatcctaaaactttataaattttatttttgaacagcattttaagatttagaaaaatgaattccaaattaatagtgccctcataatttgagggtactcatttgacatgtgagtattttcaatctgagagtatatactcctgaagaaggaatatagttcaaagaagtcctcaaaatcaaattaggacaatgctaagtgtctgtggacttcattctgttcccaaatgcatatttttgattgtccttgatattactggaagtcacatgcaagtttattttggtaagaaacaacaagataaacaggtgacttatgtatgattgactaattatgtttgtgccaaatttattttggactgtactttcaggagttttgacaagataactgttttaataaaaatgagtcaataacaggagtgatagaaatctgtaagaatgtttcaaatgctttatagtaaaaaagtgcaagttgaattcattatcataaagaggtacataatgcctatattaattttcttttgtccccaatttactttggcgtcaattactagaacccctatcatgtctggttaagtggaaaaatattctggttaatttttgttgttgttgttttgtttggctgtgaaacaagacttgaagttttcagtgaatctactgagttacatggcaccttacttagagatgcacaatactaactgtatgaacccatgaggcaaaatattaacaacatgtttcaggaactttgctgggcacatgcatatatagggttgaaaaaggaggaatattaatgtagccttgagcaatagctatttctggaatgaagatgaaaaaaatccacaattacagtttgagttaatatttgtatgttgctttttgcacgtgctttctgttttgatcttcaaaatgaccctgtgaggtggtaggtggtgtcatcctcattttacagatgaggaagctaaggttcagaaatattaattcccttaagtcacaagtaaataagtggatttaacctgagcgttcaagctccactttccatgttttccctttccatcaagtggggacacagtcaagatattaatccaaataaagggtatcagcacaaattttctgggaggaattgttcttgcaagacagaggaaaggtaaaatctagacatatatggaactagggttgtctcaaattgaacggttcatggactgaattcatcctgaatatgagttaggtataactagctctgcattttccaaagggtgtgaatttgactgccttaggtctaaaaaggtttttcttgatttctcagtgtctaccactctgcttttctcagctgagtcacttatatcaccttcttgtattctgatgttgtatgaacatgtaatcctgggctgattgaatcacacaaacaagaacatggtgagacatatgtgggcgtgagtgcagagagcaattttatctggcttgagcctaggttttcatgaaggggactctggtggaaagttgttagggaccagattatggatgctatctggccctctttgtcccccaactccactccctcttccacgaactctatgttagttgggtggccgacatacaagtgagtaggaataaagattgtcacgtgtgggctcagtcttcagaagggaggtcctgaaactttgaccataaatgatataggtccaattctgtgggaaaccattagtacagacagcgtcacaaagctacgtgttctgagctgggagaaggaatcacggtgcagttgcgggtaagtgaggaaatgtcctgagtgttgctgtgaatactggctgatgttagtagtacacttttgagggtcagtgggagaatggtgttttatcagtaacacaattttaagggtgaggcaagtttagaaagatgcaatcaagtttctttgtgtatgtagaagattattttgtgagccatctaattaaggcaagtccctttgattggaaactttgagtgggaagacttgtctgagtccagtggacctttgagtctttggatgatttggaggagaaataaggttataaaaaaattatcatatcaagatttgaaattaggagtttctctcctactccccatctcatggccttggcacatgctttatttccttcatggaatgttcttccccaactgtcagtggaactgattctttcttatcctttagactctttacctattagcacaactatccctcatttgagagattgtcccagacaaccctatctaaaaagaagttccttctacctttattctgttctttagtcctgtactaattttcaccacagtatttctcaatttataattgttttgtcttaaataaattatagacatataaatagacatataaattatgtttacagtaacgtaccctcataatactgtgccccatagtaccctcagggaatgtgcatttcatagggcagggagtttgaattcagagtctagtaccatgccagaatggatgctctgtgtttgtgaatgaatggaggaatggttagaatatagctgagaagaaaaataccatgggtattcatgagaaagtgtaccacagattctcgtgtcagatggaggatgtagcatatgcttttctaatgtgtgttataacagaaattcatacgtaatagcaacaggggaccttatatgtatagatatctcatgaaaatttcataatgctaaattagaacattgattaattcttttaaaaagttataggattagtatattttggatgtaaaagtttaaatgacagaaaaagctatgaagggaaggtaaaatatgtcctttttcaattcctttcactaatcactattaatacattcttacatgtctttttgcaaattttatgtatgtatctatgtatatagcattaatgtatttatctttctgtagataattagttgcctacttattatttcaaccgttgtgatcacaacattaatatagtttttctatttgcaatttttatctaatgtatcttttttttttcttttttttttgagctggagtcttgctctgtcacccaggctggaatgcagtggcacgtgatctccactcactgcaacctctgccttccgggtttaagcgattctcctgcctcagcctcctgagtagctgggactacaggtgtgcaccaccatgcccggctaatttttctatttttagtagagatggggtttcaccatgttggccagactggtttcaaactcttgacctcaggtgatccacctgcctcggcctcccaaagtgctgggattacaggcgtgagctactgtgcctggcctatctaatatatcttgaatgtcttctcgtgtcaacatataaagatataatcactctttttttttttaacagttgcatactactctattgaagtttccttctgttaccattttccttctgtatgaaaacttccattcttttagaacaggtctgctgctacaaattcttagttttcattcatctgaaaatgtcattattttatttgcatttctgaagggtattttcactgcatgtagaactccagtttatatattttttcccccagcgtgttaaaaattttgtgccaatttctaatggtcttcatggtttttggtaggaaatccatagtcatttgagctatagttcccatataggtgattatcctttggtgttcactcacatttttcaatctgtgtttatgtcttttaccaaacttggaaaggaaattttcagccttcctctttctttctttctttctttctttctttctttctttctttctttctttctttctttctttctttctttcttttcttttcttttctttcttttctttctttcttcccttccttccttccttctttcttttttgagacctagtctcactctattgcccaggctggagtgcagtggcatgatctctgctcactgcaacctccgcctcccggattcaagcgattcttgtgcctcagcctcctgggtagctgggatgacaggcgtgagccaccacacccagctaatttttgtatttttagtatagatggggtttcaccatgctggccaggctggtctcgatcttctcacctcaggtgatccacctgcctcggcctcccaaagtgctggaattacagacgtgagctaccacgcccggacttcagccattattctttagaaagtgatgttccccaccctgtgtgcaagtatgcagttatttttaaaatgagattggaggacaaaagagttacaaacggaaatacattttggttgtcttttatatttacctatgtagttatcctacaagtattctttatttatgtggattttagttactatatagtgtcctttcatttcagttttagggattctgtttagtgttacttgtagcgcaggtttgcttgcaattaattattttataattttaatttgtcctttatatatgaagaatagttttgtcaatgtagaattcttggtatatgtttttgtttgtgttttctgtttcagcactttagatataatatgccattctactgtcttctggcctccatggtttctaatcagaaatcattggttaaccttattgatggtctgttgtatgtaatgaattgcttctctcctgctgctttcaggattctctctttgcctttggcttttgattgtttggtttaggtgtttgtgtagtatggaaccaccttggagttaattgagcttctttgatgtgtaggatatttttttttccaaaaaaatggtacatttggctgttaccttaaatattcttttaggccccacttctcaatcccctgtcctcctcttctcctccttctctcttctcctcttttttttgggactcctgttgtgcacctgttagtattcttgattacgttccacagctctctgaggatctgtcagtttttcttcatccttttttctttctactgttcagactggatagtcccagttgacctaccttcaaagttactgattcttctgccactgcaaatctgctattgagtcctggtgattttaacatttctgttattgtacttttcaactccagatactctgttcagtgaggcacctttctcatacctttttttcttttcagatggagtcttgctctgtcacctaggctggagtgcagtggcactgtcctagctcactgcaatccctgcctcccaggttcaagagatcctcccacctcagcctcctgagtagctgggactacaggcatgtgccatcatgcctggctaatttttctatttttagcagagatggggttttgcaacattggccaggctgttctggaactcctgacctcaggtgatctgcctgccttggcctcccaaagtgctgggattacaggcatgaaccaccatgcctggcctttctcatactttctttagttctttaggacatgcttttctttaattctccgaacatattttacacagctgattgaaacgcttttgtattgagctgaaaggtggcccctgagatatgtccatgtccttatcattggagcctggcttatatgagaaaagtgtgactattatcacatatgttaagatgtgattaagttaaggatcttgaggggtggaagttatcctggattatcttggcgggccctgaatgtaattacatacatccttatcagagagaggcagaagatgtcttgagacacacaggtaaggagaaggcattgtgcagaaagattggagtaatgaagcctcaaagcaaggaatgctggcagctaccagaaggtagaaagagcaaggaactgaatctgtcctatagcttttagagggatacacagtgctgcccacaccttgagtttaaacttctggtctccaaaactaccagagaataaattcctattgttgtaagccacctagttagtctgtgataatttgttatggcaaccttacaaaactaatgcagtctagtctagtctttgtctagtaagtctaacatctggcactcctcaaggacaatttctattgactacttcttatttttttgaggcctataagtttttaatattcccacatgccttgtatttttgttgttgctgaatattaaacattttaaataaaattaatgacaattctggaaattatatgctggctctttttttaggatttgttgttgttttcctggtcagttttctgaactaaatctgtaaagtttatattctttgttgtatgtgaccactgagtgtcttctcaattagcttggtagtcagctaataatttgacagagatttcctgtcttcaagtatttgctgaagggctctgtctgtgctgaggcttgccttccatgctcagccagtccattgactcttctgccttagtctttacctctttattgcacagagcctcaaggttagtaagaagtgaaattgtaggcccttctcaagttattcctgagctgtgcacagccctgggcatgcaaacgtttcatgtgttcatgggtctcataggttaacaggaatatggtggtagcttctcaaagctccttatgaatgttcattcctcagatctcccttgataagtttttttgcttagtctattgtttaccccaactattatccactgtttcaggcagctgagatgttagacaattggcaaatgcccacaaagagatggttgttaacagtgggagaaccctgaggcaggtcaaataaaggaaagccttgaaaatgaggtattttccataggtcaaataatgacaattctgtgctaatggggattccaaggagttccaacccagttcagtgtcttctagtggctggtagtctgctggttttcactgtgattgcaacttactgtttttcaaggctagtgcatagctggggatgcagagatgggaatagggcaagttaaaatgccataaactcaactgtttttaccatgattcaactgttttttaaacacatgctccctggattgctacaagccattactcaatttccatagttctgaaaaagttgttattgactatttttgccaatcttgtcattgttttgtggaggagaggattttcggaggtctttaccctgccattcgtgctgatgtcactccggcatatggcttttgaactctgtgcagcttgcctcctccgagttgctgtttactgtatttatggcttattctgctttgaagaagacttctttgacttttcttttgggttgcatcgcatcccctagattctacttccatccgaattgggggatttcactgagaattatcagaattttctggattcagtttcttccgtctctataatgcgtgttgatagtcatgaaaggaactgaaagttgatgtcggaaatatttactctcttgtctctgaatggcattttgtcaaaatttgtggtatagtttgcttactttcttaatttgattgctgcctgtatattttcctttctgtatttattttgttaggttttgggggttagagcttgcataattacctatttcctgtttactgtctttttttgaaatcatacaggattattcactgtgaaatcaaatgaaaactttgatttaaaaaatgaaatgcgtagctttttctttctggctataattagtaaggctagtttctgtctgtgaccatacctagtttgtaatactgaaataataccatcatttgtcatattattaatatctattctcagtaggtggagggcagtagaatgtgttgagaagaataagagggtccattttgttttatctctttagattcctcagtagtgatttgattctttaagactcaagttgattctcatagtagtgttatggtatagataagtattcccctgaatatggctggctatataatatataagtaatagaaaaattagtagtagtagtaatagcagtagtgataagagtagtagcaataataaatttttaataataagaaaattgtatttttagctcacttttacaggaatattataagacattggtattttttagattttctttgcccatgtctcacagtacgttgttcttttgttcacatggataaagtattattatgaaacttttataattttatgttctttaaaactccaatcttaaaactgtcttcagagcattactgtttctgttttcgtaacaacaacaaaaaaaaccctaaatctgttgactcgtggttccgaaaaaactataaaattcagtaacttcctaattgtagtgaaaagagtttttccttgtctcaggagacaacctagattcaatcatgttgtggtagtgtggatgtaatgaaacttactacattactaaggaatatgttggcagttcatatcatatcatttcctaactcctccttatctcattgtaccagaatcctaggcattaaaaaaatcacaaacacacatctacaaaccccatgaaaccaaataactatatgccatttggaaaagtgttagtttgggatacatgagcaagtgattagtatttttttatgttaatcattttcggtttatttcatatatgttttttctgctggacaattatttcaggtggagttgataaatttcacttcattcagtacaccatgccagtgctgatgacacagatctggagtaaatgtgattcctaccatcaagggacgtgtgtgtgtgtgtgtgtgtgtgtgtgtgtaactctaggaatttcttgagtgtggtatatggatttttactaaacagcgctgtttttatttttcaaaaaacacctataatatttaaaaatatagtaattgctctttagtacattcattttcatatgtccctgtgtagcctcttttaagagtttttatgggcatgtggcttttctgatagactgaataggtttttcaaaatcttgcataatctagtgactgtgacaattatgttgtcaggaatagaattttattgcttgtaggtttacttttcacacatttatacatgtgactaaaaaagggaaaagctattttaaatttgaagtgagcttagctcatattatgtagtcccttgagggcacatgagtctcaggatttggcacttccactccactttattggataggaagaggtaatgggtcactagtcttagtcaatatctcctttttttgaaaggaaatactctgcaagggcacagaaaggaggacgtgaaagaagattgaagtatttcgctttgtggtctaagctcttacctttaactcataattatagtgctaactagaatgtcttatgtttaggaaggagttggagatgaataaaatggaacagcttattaaggcaaatgtatttgtgttaaatagcaaggaactgacctaaaacaaaagagaaaacttagtttgtattgcatacttataaataagtctatttgagataatattcattgaatatatacaatgaaatgacaatttagatactttgaaaactttgtaagctctttgaagttgtgagatgacgtactcatatccattatctttggaaagtatttagtgtggaaacgtgataatattacatagagaactaataaagatgtgtctgctttgtaagatttcatatttaacacagattacattcattaatttatttttattgaatgtacaagaagaagcttggatagacattaattaaattgtcagaaataaatagaaattgtaagtatgacaccccctgcaaagtggagttttatggtgctataaaagcattacgtggagggatttgatgtagtcatggccctctgggaaagttctctgtgaaagtgatgaagagttgagctctgaagatagactaagagttactgagcaaggggtatggggacttgtgtttcctctgtttgaaattatatacatattttatgctacacactacatctatgtattagtaatggcctgagagatttgctctaattcatgttccttttcagatgaagaaactagaatccatcgattttaagtaacttgcctgattcatagctagcctgtgattaaaattgaagtagcactatgttttatgattcatcccatttctattaggacgggttcaagacataggaacatcagaacaaaaacggacttaactctttattcagttatttattttttcatcttaaattacaaagtacttactatatagaaaggactgtgctacttgatgtgaaagatgaggaggtaaatgatatgtggcatttgctttcagagaacttcccatctattgggaaatacaaagcataatctgaatttagagagtaacatgatagatgtcaatagaaaaatatagataaaatgtaggaattctgataaggaagagattgtgtccattgggactaagtttggggtggcttcccggaggaaatgataattgagctggtcttaaacgtgaaaatgaaaggcatttggtatagaatggactgcgtgatcaaagcaagaagttcgtcagggcatcagcaggtagttctcttagatgacactaaaatgtgtgaagttgtaatgcatgtcttaattaaataactgtctttgtttctcccttctgtaatatgcttccccctgcacagatctccccccgctgccccacgaaatgcttgaaaggtagcttgactctttgttcgaggctcagtcctttggatgttaatccaactgggatggtgtaactaaataattaattccttctcaacccctcggtctctctgattccttaattatcccgcagcagagggagagatagtgggaaatagatttgaaatatatattgacacatgattgtgggtaaatactatagataaggggtagcccttaattttcttataaaaaggagaacaaactactggcagttgttcaatggtaagtgcattgggtggaggataaagaaaggttgaatgtgaagctgctctgtggggtgctggggatacaaagataaatatgtgtacttcagggagtaagtatgatgctcaaaacatgatgaaagcctggtgtgagacaaatcatgcccagcgtgtaagaaagtgaagctattagttctcctgtgaagagttttgaaaggcttcacggatatgtgggcttttagttgcttttaatatctttatgttttgtcttcttagatcacaggttccctgtggtttgttatcatccagtagttgacaaggtggtcttactgctaggtgccaacacataccctggctcccttagtcagtaatttttttttttttgagacagtatcttgctctgttgcctgggctggagtgcagtagcatgatcttggctcactgcaacctctgccttcaagcaattctcctgccttagcctcccaagcagctgggattacaggtgcctgctaccacgcctggctttttttttgtatttttggtagagacggggtttcagcatgttggccaggctgaatgcctgacctcaagtgatccgcgtgccttggcctcccaaagtgctaagattacaggcatgagccactgtgcccggctccctcagtcattcattctacaaaggcgtattgagagcctactatgcatcagtcactgtgctaggttctgagtcttgtggtaaacaaagataggctcttttcttgtcctcaagggccttttcttgtcctcaagggtctgggaggcaagacacattaaacaagtaattaaaataaaatgtgattagtattaatgatagagtagtatggaagataaaggcgagacgattgtcaatgatcataacattctagggaattgaaaatagtcttattcgttcatattttaatttggcactgctagaatccatcatggccactgggaaagattcatatgaattctaaaattaataaaatcataccatgtgaggggtgaagagaaaaggaggattcgtgggttaggatcatgggctttggagttcatggttggagtcagggacagttctggctgaaattctatcagtatgtattcgctaggtgatcttgtataagcaacttaatgtcactgttcttggcttcttcggctgtaaaatggggaaaattacaattcatatcagggttgtagtaagatttaagtgagatgagtactttaagtatagtgcctggtatatagtaagtgtccaatgaatgctgtcttctaaaaaagatataattgctcgtaagagaatggcatttagtgtcctagtctttctgtaggattttgacatgatcttcactgatccctgtcctcaggcaagaaatctgaattccttgtgctgcttctcccatatgcaaaaaggactatgtttctccttttttctttttagaaaggaagtataaagattaattacatcatacaatggtcttttcatttttagggaaaggtggtacatagatgtgtttcattccttcctcaaatctgtttttgtactaaagttgagaatgcttcaagtctctttctattttttaaatgcatattgctgtttagttagcttttaaggtgacgtgtggacgtttcttataaaaccaataatttgtgtcactttatatagcattgcaaaagtcctttcttgccaattttgttgtgacatgtaacaattgttaggggggatggatgcatatccagatgcttaagcagattttattgattataaataaaatagcttaaaaataaagctttaaaaatgtaattactactgccatttttacacacaaagaagtaagagtaaagaaatatgtggtgttgtcttggggacagaaggatggcctggtttcgtcttcactgtactaggacacagatgcaatctggaaagccatcttagaactgttactgtagaagaggctggtgcttccccaggagtgcacagctaggacaagagctttgcatgttttcagaaagcccctgacactcagctgttaatctgaaatatctagaaagcacatcttctcaataaaccttgttatgcaaggaatgtctcgagccgtaattcttttaattcaactaaatccaacactgatccctcatcccaccatcttgacgggaatctcagttataatggggctccctcactcacaaagttgtggggctgaggtcctgtgatggtgcatagaacaaagtattcaggtaagacccttgagtttttagttcaaattagtttgctaatttcctaatttgttagctaattagtttctctcaacagaggcatactggagttttggtgggatagttcttgtggtgtgggaatgttctatacgttgcaggatgtttttagcatccatgactttgattcattgtgacaactgagaaaaagccttttctacctttccaaagttccttagttgagtcccacaatacacatacttttatccccccggcagatcccttggactgtgatggggttgggactgttgtcccaggggtgtgagaaagtagtgggcccaggcgctcttaatggagcctcgtgtggccaccttgcttttatttcccatgcagatccaacctctttgctggagctctgcaagaggaaacttttgggtgcatttacttgtaggtgccacagaccagcccttcctcaagcttggggcaatctttttctttctcttgctgcttgtgccagacctgtccccaccatcatcccttactctcacaccaatgcagtggcttctttttgtgtccatagtactaagcttttggaaaacaatagccagtaaaggaaattctcttaggccacttctgtggtagctgggctaccctgtggtgaggaagcatgcaagacctggctctcttctcaggaggtaggatgaggtatcaaaaggcaaaatagggaatgcaaattactaaatgtgatttcaatcttttgggttattcgatagcaataaaactatgaagctcattaacatctttgtaacttaccttgcacccaaacgtaggtattattcatctcccttcaaaaatgagtgatcttgcccttcctgtatggtctgatttctttaccatggggaactagagctctgtaacttgggcagatcggatacatggcccacatgtaagactgacacaaaggcaggaaatctatggacagggttcagggctatacttactttctatttgggtttttgaactgaacaacagaacacaggaaactacctgagtcactatttttctgatttctcttgtggatgctactttctagtttaataggaaagaagttagattgttatatggaatggttatctcagggcattcgggtttatttttcttgctgaaccctttggagtgattagtgctaatccttgtttttctggtcctgttgtcctgtgaaataatcagaattgtggtgtacaaatgagttctcctctgttaaaggaggatgataataatacctactatgtaggtactgtcgaaagggattaataatgtctataaagtgcttagtacactgcctggccctcagtgagtgctatgtaagggaataatgttaatgggtccaggcactatgctaagtactttacatcttggtgctttctcatttcatcgtcctctaactgttcctgagatagatactattattcccatttcacagatgaggaagagagtttgttacttccctgaggaaacacagcctgtaagcggatgagttggaatcggatgcaagtttggaaggaagtatcctctccccaaatgtggggcagagagacgcctgggctgacctaattgttaaagcctcagtcagtgttatgctgaatttgtcgcttacatgtctgcacattactttcaattgaaagtagaaaaatgaaatagagatctaataaacattaccacaatgttaagactgaaaaaatgaatctttgtctaaatctgttgagtacagagcctacacctggaacatatttctttgatccccttcataaactgctaaaaaatatgctgtaattacaggcatttagtgaagcaagctactgggcacttttgtaataggttgcattttcttttccttaggataatgaacaggcttataatataatgaggaaattttgacttcctcaccttaacttagttttaatacaagtcattgaaagcaacagaaatcagagcatttatttatttatttatttttggagacagtctcgctttgtcgtccaggctggagtgcagcggcgcgatcttggctcactgcaacctccaccacccagattcaagtgattctactgcctcagcctcccaagtagctgggattacaggtgtgtgccaatatgcatggctcatttttgcatttttagtagagatggggtttcaccatgttgctcagtctggtcttgaactcctgacttaaagtgatgtgcctgccgtggcctcccaaagtgccaggattacaggcatgagccactgcgcccgggcagaacattttaacatttaaaatgttagcagatgttcctgtgaacttaatgttttatattttcacatcatcatgctctgaagtaaaatgaaagcacagtctcctattattttggatttggataattcataataatttagatataagggatcttgttttttctcagaaagagtcatccatggttcataatattcatgttttaccacttaagaacttaaaaaaatatgtttgagatattcatttattgtgagaaaacctgctgctcttctagcttttcattggctagtcattgtcaaaatatgcttgttattgttttaatatgtatcaagattatttctctttgtaagaaagagtatttgtttgtaagcactaaaaagactaacttagataaaatataagaatgttttacaaagatttctttgccaaagtaaggcatttaaagaaaagttactgaggccggatgggatggcttatgactgtaatcctagcattttgggaggccgaggcaggtggattgcttaagttcaagagtttgagaccagcctgggcaatctggagaaaccccatctctacaagaatacaaaaatgagctgggcacggtggcagacatgtgttgtagtcccagctacttgggaggctgaggtgggagaatcaattgagcccaggaggcagaggttgcagtgagtcatgactacgccactgtactctagcctgggcacgcctgtctcaaaacaaacaaacaaacaaacaaacaaacaaacaaacaagcaagcaaaaagaagagttaccgaacatataccttactgttttgtgttctgacttcaaagtcagcaacaaacaataataactacaattctaacttattggggtcttaccctgtgtcagtttatatcctaagcactttatctcattgtcaatgacaaagcaataaggtaaatattatttctatttcacatatgaagggactgaggaattagagaagttatatgattttcccaattaagagagtcgatataaatagtggcaaagtaatttcaatccagttctttgtgattatgcactactcctaactactgcactctgatatggataatatagaaatgcacaggctatggcagagacacaacaaaaaaagagaattttagaccaatatctctgatgaacatcaatgcaaaaatgctcaataaaatactggcaaaccaaatccagcagcacatcaaaaagcttatccaccatgatcaagtgggcttcatccctgggatgcaaggctggttcaacatatgcaaatcaataaaagtaatccatcatataaacagaaccaaagacaaaaaccacatgattatctcaatagatgcagaaaaggccttcgacaaaattcaacagcccttcatgctaaaaactctcaataaagtaggtattgatgggacgtatctcaaaataatatgagctatttatgacaaacccacagccaatatcatactgaatgggcataaactggaagcattccctttgaaaactggcacaagacagggatgccgtctctcaccactcctattcaacatggtgttggaagttctggccagggcaatcaggcaagagaaagaaataaacggtattcaattaggaaaagaggaagtcaaattgtccctgtttgcagatgacatgactgtatatttagaaaaccccatcgtctcagcccaaaatctccttaagctgacaagcaacttcagcaaagtctcaggatacaaaatcaatgtgcaaaaatcacaggcattcctatacactgataacagacaaacagagagccaaatcgtgagtgaactcccattcacagttgcttcaaagagaataaaatacctaggaatccaaattacaagggatgtgaaggacctcttcaaggagaactacaaaccagtcctcaacaaaataaaatgacacaaacaaatggaagaactttccatcctcatggataggaagaatcaatatcatgaaaatggccatactgcccaaggtaatttacagattcaatgccatccccatcaagctaccaatgactttcttcacagaattggaaaaaactactttagagttcatatggaaccaaaaaagagcccacattgccaagataatcctaagccaaaagaacaaagctggaggcatcacgctacctgacttcaaactatactacaaggctacagtaaccaaaacagcatggtactggtaccaagacagagatgtagaccaatggaacagaacagaaccctcagaaacaataccacacatctacaaccatctgttctttgacaaacctgacagaaacaagaaatggggaaaggattccctatttaataaatggtgctgggaaaactggctagccatatgtagaaagctgaaactggatcccttccttacaccttatacaaaaattaattcaagatggattaaagacttaaatgttagacctaaaaccataaaaaccctagaagaaaacgtaggcaataccattcaggacataggcaagggaaggacttcatgactaaaacaccaaaagcaatggcaacagaagccaaaattgacaaatgggatctaattaaactaaagagcttctgcacagcaaaagaaactaccatcagagtgaacaggcaacctacagaatgggagaaaatttttacaatctacccgtctgacaaagggctaatatccagaatctacaaagaacttaaacaaatttacaagaaaaaatcaaacaaccccatcaaaaagtgggcaaaggatatgaacagacacttctcaaaagaagacatttatgcagccaacagacacatgaaaaaatgctcagcatcactggtcatcagagaaatgcaaatcaaaaccacagtgagataccatctcacacagttcgaatagtgatcattaaaaagtcaggaaacaacaggtgctggagaggatgtggagaaataggaacacttttacactgttggtgggactgtaaactagttcaaccactatggaagacagtgtggtgattcctcaaggatctcaaactagaaataccatttgacccagccatcccattactggtcatatacccgaaggattataagtcatgctgctgtaaagacacatgcacacgtgtgtttgttgcggcactattcacaatagcaaagacttggaaccaacccaaaggtccatcaatgatagactggattaagaaaatatgacacacacacaccatggaatactgtgcaggcataaaaaaggatgagttcatttcctttgtagggacatggataaagctagaaaccatcattctgagcaaactattgcaaggacagaaaaccaaagactgcatgttatcactcataggtgggaattgaacaatgagaatacttggacacagggtggagaacgtcacacaccggggcctgtcgtggagtggggagatgggggagggatagcattaggagatatacctaatgtaaatgacaagttaatgggtgcagcacaccaacatggcacatgtatacatatgtaacaaacctgcacgttgtgcacacgtaccctagaacttaaagtataataataataaaataaatacataaagaatagtcataatacaaattagatatagagatgaaaaagaaatgcacaggctgtcatggagattgagaggtggacaggtaagcaagcctaggattcatgaatcttaaagtatatgggttagctaaagctatagaggcgggtagagggtaatgggtggggggaagaaatgaattccaggtagagggttcggaaagcacatcttattattgttacttgttactacaaatatcaagtgaggtttgcatgatgcagcaaaagtgaggtccaaatttttgagaatctgtgttaaaaagcttgggcattatcttgtatgacagagagatactgacaggtttcacccatatcgatgacattgtaatatttgtgttttaggtaaattactcttgaatgggtgaggagatggttttaggagagacaaaactggaggaagggaagccagatttaatcttccatgtgaaagatgagcaagactttggattaagtcagtggtagcaagggatctatttgagatgtaagtttgaaaaataaatttacaggagctagtgatgcttagctttgggtgatgaagcagagaggagttaaacaaaaagtgccaggcttaagcctgtaaaactgggtggattgtagagtcaccaattaagacagtgaaatgcaggaagagggtcaggcagaagatatagtgagtttggtttggggcacattgtctttggtatagtcaaatggtgatagtcaacagaaattgaccatatgagtctgatcttgtcggcagagatttggggtggaaacagttgaggaattattatcatctgtggtaggtgctattattacagtgactgagtcatggtgcatgggggaataatgggttgtagacggattactggggtatctaggttcattgaagaatgggaaacccacagaagacacagaacaggaataatcagatgtataatgagaaccaatggtatgtggtatcagagaaacagacacaatttcagaaaaatgttaaacattgtgcagtgctgtgtagaggtcttatgagataagggttgaaaaatgtccactaaattagggaatggagacaactggtgacttttgcaagaagcgatttgatagaatgatcttgacagaagccgtgacacattgggtgtagaagtaaatgttggattgggacttgaggcagcaagtagggaatcctttttcatgtattgtggatgataaagggagaagattaagaggtagctacagatggagttttttggggggttgagatggtagaatttagcagatttctaggttatgggagaggaggctattgagagggaggtgttgaagatagaggagggagtatgaccaatgcataggtccccagtgagtccgaagtctggaataaagagataagtagaggatggaccttgcacgggtctacagacccatttctttcctgaaggaagggaatgaagatggttgtacttttagagcatgtgtgggtcatatgtgttagacagtccagtgattacacagctggtttcagccatctggaggaagaaggaagcagtgataactcttgaaaatgaatgtggtgagacacaaagagagtagtaagagattgtactggtttctgaattgctagaattaaaaacaacagcaacaaaagcaaccaaagaattgttctagggattgtgtcttagtctgcagtgacaaaaatgtggaggttgtgcagaaataatctatgaattgtcgaagacctgaactttattctttgactttggtgactttgtctatagttgctgagacacgggcaggatgagaatattttctttatagcagtggttttgagacttgactgctcacaggtgttacttgtcgaacttaaaaaaaaataatgatgccgaagtcactctcagaaattctgcatcatcaatatttttaaaatctccccaggtgatttgactatgtagccatgattaagaaccactgctgcagacctgtggttagcaaatgggtttttttaatagaagaccagatagtaaatattttaggcttcgtggtctatacagtccctgttgcaactacttaattcacactgcaaaaggaacatagataatagataaataaatatgcccatcttccaataaaatttttctttgaaattttattatgacttaattgacaaacataaattatatagatttatattgtgcaacatgatgttatgaaatatgtatacattgtagaatggccaagtcaagttaattaacctatgcattacctcacatgcagtgttaactatcgtcaccatgttgtgcaatagatctcttgatcttattccttctaactaaaattttgtatcttttgaccagcatctccccagtgcttcctctgcttcctccaccagtccctggtaaccaccattctatcctgtgcttctatgagtttgactttttcacatttatatataagtgaggtgatgcagtaatttctattttattttttatgcctggcttattttaattaacacactgtcctccagattcatccttgctattgcacataacaggagttccttctttttaaggctgaataatattccattgtttatacatacaacacattttctttatggacacttaagttgattccatatcttggctattttgaataatgtaagaaagcttttatttatggacacaaatttgaattccttataatttttaaatgttgtgaaatattattattgttttaattttactcccaaccattagaaaatgcacaaaccatttttatctcataggccaggtaggcacagggtgcagtttgctctggatccttgctgctacccagcgtggtcctgaactcgcaggataggcatgacctgggagctaattagaaattcaattttgaggccaggtgaggtggctcacgcctgcaatcccagcattttgggaggctgaggcaggcggattgcctgaggtcaggagtttgagactagcctggtcaacatggtgaaacctcgtctctactaaaaatacaaaaattagctggttatggtggctggtgtctgtaattccagctacttgggaggctgaggcacgagaatcacttgaacccaggaggcagaagttgcagtgagccgagatcctgccattgcactccagcttgggctacaagagagaaactctgtctcaaaaaaaaaaaaaaaaaaaaaaaaagaaaaaaaaattcaattttgagcctcacctctgctgtactgagtcagaatctacattttaacaagatcaaagtgatttgtatgcagattcaagtttgagaactacttatctgctttaagccatattcccccattcccactcagctcagaaaatgtgggagcctcatcatttcttctgttgtctcagggaccttttaatggaagcatgagagcattgaaggaaaactatggcaacaggctgtcatccaggtgttctgagttgcttaacaatttgggtagtcttgcttttggttctagaaatccaagtgggaagttatcattctcctaaaaaaatgaagagtttaatttatattctagcaactatagactgttatttttacagaatgggcatactaaggttcttacagggagaaccaaactttcctttaagagacaccttgaatttattcaacagcctctataaggacttttttgagacttctgagaactaaagccaagagaatgtaagagatagttttagctttgctctctgataggataccatagaagaatattaaatatataacaactagcatggacactcagagtgagactgttagtgaaagaagtgtcccccattttttgcatttttgaggttcagaaagtgaattatttaggaaataagatgacttctgttagataaattggaagaaagtggaatttgaaatgccttaatacaactctgacatggggaagtcaaattttttttgaaccttagttttatcatctataaaatgcagataatgtttttataccaatttttccgagaattattatgaatattaaatgtatgataatttgccctgaaaagtactcattgatgttcagaagtagaataagccgtgcttctgtgtgtttaaaagagcttgactaagactgtgcatttgtaggctgacgaaacaacctttaggactgtctaaaacagtcctcaggttgaactaaaagtacttatcctgtaagaaaaaaacaatttccttctagcttcacttattacatttttgccgatttacttcccatttgactctggtaagagtaagattaataatgggactgcagcaagagtaaaatgttaatcccccaggatgtggagagaaaccacatgcatacaaatgtgtttaacattgatttcccacgttatttattttggctaatttcctttaaattcacatatatgtgtggattcaggcacctgttgaagagagtattaagcatttacttattttgtttattcatctttttttattacctcattctccctcttttgtaaaatacaaaccatcacttctttctttaagcagtaactggacaaagcaagacaaaaaagatcatgggctcttaaacttttatgctatcttatatgaccatgagggaatgacccccttctgaattcctacattccatttcaacaagtttgattttatagaaaatgtaaaatatgaatactatactggtctttaaaaataatatatatcagatagaccttaccaccagagtcattaatgtcatgccacttttaagagttgaaaactctgatgatagattactgaaatggttaaaaatgcatgcagagtggtcctttccagcgatatctcccaggacacttctgtgatgtgtacattatgctccagccaaagcagactgtatctcaaaggagcatgcatttttctgtggttggaactttgcttataatattctctatatttagaaagccctctagccaccttttactgacaaaattccatccatcctttaaagctcagctctcaagcctcttcattcacatatccttcctgatcctgccaactggatgtgatatttatctcctttgagccctcaaagcactttgtatttacctctcttatggcacttagcttattttgccttatgttttagttatttgtgacttcgacttctggacagcagggagtttattcttgaaactcttgaaagttaatgctcctatttcctcacaaagatcattgtggaggagagcaaagacagactggttagaaaagggacattatatccagtctaagttgcttttgtcttttggatagtattcatcaaaggggaatctattatatttaataaggggattgtacctatgtttgaatacgtaatacaatatgttaagtaggtgaatgaaaatgtatatagagactgcagagaaatccatgaggtaatgaggaggagaaagagcttgctggtattcttgtgatcaggaagatgaggtgacttgcaagctgttttggacagtgtaactgatgctattgatggtccattccatatcccttctgtccactctgtgttttccttctttccttctgagatagccctgcactcactgatggctgcctacctcaaatatctgtctctcctcaatctctgactgaggtcttgctttcaaatcacaggttctagcttacctaacacagggaagttcagaaactccagagattttatgtctccatggacaaccctcaaccagtgaggtgtgggggtcagagggttgaatattccacgttctctatttcttttttcttttcttttctttttttgagacagggtctggctctgtcatcaagctggagtgcagtggcacgatctcagcacactgcaacctccgcctcccgggttcaagcaattctcctgcctcagccttttgagtggctgggattacaggcacatgccaccatgaccagctaatttttgtatttttagtagagacggggttttgccatgttggccgggctggtcttgaactcctgacctcaagtgatccacctgcctgggcctcccaaagtgctgggattacaggtgtgagccaccatgcctggccccacattctctatttcttgataagacaattctgaggtatatcatatgtcattaatcagaaagccccagtaggattgcatctcggttggccagagcagtaacctgatcggtaacactttactggcttttttttttttttttctaattttcttgttatatctccctaaattatgcttcccgggatcatgtatcaaatagggtcttgttttggatcatctcatcctagtacattctaatcaagtgtagctgaagacttggcaaagaataaattagtcctgttataaggcccaatctttttattagtgatatcataatcacaacagctataggtaaaataaccacagagtaatgagagtgagaaagatataatttatttagcatgattttggagaagaatttttggaggggtctggaggggatttgtgcagtgaacaaaggattgaattataagaaggatgaccttggggcatagataaaagtgattgtattgagccttcatgcttgaaaattgaatgtgtactacatacttctcatatctcctgttgactttgtccataatcagtataaataaaatcaacatgttttataactccactgcacacatctgacatgtctgattgctgtttcactgccactgcaatgtggaaagtgaatctagaaggagtataatagatgaatatacattatcaccctgctgcattagtgaagaggtttgcaaaggactgattttgatgcatcagtcaggaaatttttttaaaaaacaaaatttaacttgtggcaggatggtatttatactaatttcttattagaaaataattattttaccatttgaaggtagattttgatttaaccctaagggaagaaaagccaaggaaaaaaaatgttggaaggaaagaaattaaaaaatctaaaccctgagaggatttaaggtattaaaaaatatatgaggaagaaattaagactcttaggtgataagtgacaaaaaacctaacccaaattggcttcagccaaaaagagaatttattgttttatgtaactaggaggtccaggcatagaactactctcaaaccagcttgattcatggttcaatgtcactaggatcattttcagacccagcttctaatagggtagggtggtcaccaggagattgagagtttcctcaccacaataaaagatacaacaggaaagagaattcgtaccaaaatttaggaattgtttctccttgggtcttattagcctgatttggttcatgtgtccgtctccaaacaaaggactggataatgaaatgagcatattagcttattttgctttttgctttccaatctgtatgtcattaatttctttttctggcttcattgcactggctagtacccctagtacaatgctgaacagaaagggtaagagcacatcactactttactcctgatattagagaaaaatggtttagtgtttcaccattataatggtagttgtagggtttttttaaaaaatagatttttatacaaaaattagctgggtgtggtgatatgtggctgtaatcccagctacttgggaggctgaggcatgagaattgcttgaacccaggaggcagaggttgcagtgagccaagattgtgccactgcactccagtctggtgacagagcaagactccatttcaaaaaataataataacaaaaataaaaataaatagattttatctatcagactgagaaagtcttctatttccagtttgctaagtttttttttcttacttcataaattgggttgaattttgttaaattctttttcttatcaattgagatgataatatggattttcttctttcttcctgttagtatggtgaatttattagtctattttccattgctataaaggaataagtgaggctagatattatataaagaaaagaggtttatttggattatggttctccaagctgtacaagaagcatggcaacagcatctgcttctggtgagggaagcttacagtcctggctgaaggcaaaggaggagcaggcaggtcacatagcgagaacatagaagtgcatgtatccttttaatataatgatttctttcccttggggtagatactcattaatggctttgctggattgagtgacagttctatttttagttaagaggcgatatactcttcatgaagcatatatcttcatgagagccaacttctatctccatcttggcatcatttattaatgtgtctcctgtgacgaggacttctgtgacaggagcagtgcataaactgctcctctaactggcatttggtgagaatctaaccacctaccagagtatttctattgactttttgctgatgtgttggatttctgtgcttatgcattttgcttactttgtaccttacttaagtaatgagaacctactttcagggtccttcgatagtcatagctcatctcaggccagtcgccagagataaagaatatgagcctgtaccctaaaggagtgatggagatgtaggtggggaaaagatttttgcacccttacttgaatggttttgaacaaggccagatggaactttccaatccgtataatcatcaagaaggcatcccagtacaacccttggaagttgctaaaatgcttttgttttatatcctttcatcttcatgttactctttagctgtaatttactccttttttgtcaatcatgaattgttcttaacttttgagattaaggaaggataactggtttgattctttttttcttgtggaatagcctgtatctcataaagcctcagatatatttataaaaattatagtgtctggccttaagaaggaatatttactgtcattacaagctgaccaaaaatttccttgggctcttattacaccaaacctgagaaataattatatgacaatataagttacagtagtaccttgtgcaattaccttagactttaagaggtctgctatacactaggtccaatagggctatcttgaaatgattcagagaagggctctgccctctgtgtgctctacaactctgttaagtagaagtgtcaggctctgtggactggacaaggaaacatggaagtggaatagcatgttaagaggctactaatttatttacgtaggcaagacactgttagggcccaagcagagaatactctgttaaactgtgagcattcaggaaaggtaggttaaggactctgtattctctgaggtttgcccttccaactttgcagtctgggaactgaccattcatttaatctgaagagtgattaagccctagggaaaatgcactcacaatgaccaaattctggttttagttagaaactagtttaataatctaaaataggaaatacctcttcctagaagggaagtttacataagaccagaaataacaagagctataaatcaagacaagaaaacaacttggtgaatatttagtatttgaacaaagaaggatccccaaggaaaagccttttccaatttttggatagtcttgtttagataggggtcctctcctcttgaccatgattctgtttctttctttctgatacttttcaaaatgctccaaatttctctcttaatattttgggtttcaacaacttttttgtttttttgcaccaaacattccagattgtttcattaaaacacatttattaaacacgcataacaataatagccaatatttattgagcgtttatgtgccaggtactattctaaatgtctttaccccttatatacacttggtaaaataggtatttttatcccttttttttttcaaatgaatgagacacatggaaactagatatcttaccaaaggtaacacaattaggaaaggccgttctagaacgtgtgctattaagcattctgtaattctgtccccgtctttcttttgagttgctggagacattaaagatgatttgatagaatctattttcattgtcaagatgagtgaacagggaaagttatccaaacttagtttatggctgacataaaaatcaagctgtcttctcttactgtgctatctgacatcctatggcctggaaaacaactgcctcaattaagaaagtcaacttacgttataagaggaaaagattttctttttcttttcataaacttctatgggggaaaatttattattagaaaaataaatccccttaacaatatgcaatacaaagtcagtgaaatttccagatactgtttattggtacctgttttttttttctgttctttcttaaaaatccacttttaaaaatacatctaggttttctctttttggcttaaatgtgttggaatgggaatccatgtatgtattttaataagagctatattaaatggttctggaaatcaaatgtctgtctctctctcagcttttagaaagtccgctctcattgcttcatcctgatcgggtaggattcatcctttttagggtgagaggaagttcaatctccaaaaagcttaagtttctggactctccagagcaagcactgccaactttctgatttatgtgtggttttagtgatgaggactactgtcttccatgtatttaggtgagaacacaagagactttttactggaaacctcgtgttgcacttcacttaatttccaataggttagaggcagcccacggcatgattatgtgcacaggggcattgtctggtctcaatatctgtgttacttacttcattttaaactgtacccttattcctcatgtcctatctttattcttatatttatttttccattttccttgttttgcctttggggagtagatgactgtaaactatatgttaaacacatttttgctgtcattttccatgattttattaggttttgtacaaaaatgcaagtgcttttgttgcttacatggcacaaaaataaagaagtaggtaagcttagcaacattacaatctgtcaataaatagagagttccatgcaagctttattcacagatacataacataagacttgtcatgaagaatgaaagctgagtagtattttatccaaaacacatttgattagggtacaatttatctcactgtattaaaaacagtggtaacacttgcagggacactgaatttgctagagggactgtaagcctaaaggggcaggggaggaacatttgtaaaacgggaataacgggaataagaactatctttttaactctcagtatgttgggtaaaaagagaaaagttacaacagacataaaatgggaggggccatttgaaaattcaggagaatgttcacataacccaaacctgtcaatgtgacttgaacacaggacagagtaattaaaactttgagtttctgaggctgccatatctctgctttccatgtgattagatgattcacaacttctgtctactcaatttcttcatagtagaatggaactaatttcatgcagtttgatggcaagcatgttttcatgttttctttgtctatatggcaaacaggttgagtttacagtgcaaacatgcccttttaatctctttgaggattagttttggaagcagcatctgcttctgggattctttttgactggcttgctggctgatgcaatgtaatcaatctagatgaaattgtgcattacattcttgggcatttgtattctttggtgggtttccttttccacgctgtagccatataggaaaaggagataaggaagggatcaggaaaaggaacacactggctacactaaggcactgaatgtgaagatgactggtacaggtcacttaggaatggaaggagatggatgagcactgcaatgtgcaggaaaagggcctctgccaggacctcaggaaactccacttctgggtgactttgagcaagttgcccagttttgctgggcttcagtttcctcatcagagagaaaaaaaattagagccgatgaagtttcttacagttgctattgcacaattctaagcaaaagatggaagatgatattggttttacttgttaggcaaggctcctgacatcttgtaggtgttggtaccgagacaatgacattctctagtctttatttgtcttccttggtctgaggaagacatactttcagagaaggatccacttgacttttttttttttttgaggtggagtctcactctgtcacccaggctggagtgcagtggcacgatctcggctaactgcaacctctgcctcctgggttaagcgattctcctgcctcagcctccctagcagctgggattacaggcatgtgccaccacacccaggtgatttttgtatttttagtagagacagggttttaccatgttggccaggctggtctcgaacccctgacctcaagtgatctgcccaccatggtctcccaaagtgctgggtttacaggcatgagccaccatgctcagactccacttgaatttgttgctatctctttgcccctagaggagattttgatccatattttgatagcataacttctcgtagagaaaaatgcttctcaggtcaacaaagcctgttcagtatgattccattctctgacaggttcttaatgtttacagagagatgtgccctagcagtgctgggaatagtggtttctattcctaattctggtgtctttatagaattagctgggctttaggttgaaacacaataccaaagctctctggtatgctgagccagggaatgtttttcaatttttaggcctctttattacctgaaacccaaacctaaaccttatgactactctgtaagctgcatagcaaatcaaagagatgagagcctcacctggcagatacccctcaacagcagaagtgtttaaatagccaggccttctcctgagctgttttggcaaggctaaagtgtcagtatactcatggctggaagaagtaagagagacccaatcacatgtatacagtgaccttatccctaggaaattcagtgttttatgctcttttaaagtgatgtagtatatgtattataggatatgttatataaatatcgaccacagtttctccatttgtataatggggataatgtcttttctttttctttttctttaccgctaagataatgtttccttctttaaaattagcatttgaacatgttttaattattacaaagcacatttactttgcttcttataatatcagctacttagtatagaaaatattttacaaaattaatgtttttaacaatgaggagctgggcgtggtggcttatgcctttatcccagcactttgggaggccaaggcaggtggatcacttgaggccaggtgttcaagaccagcctggccaacatggcaaaaccctgtctctactaaaaatacaaaaattagccaggcgtggtggtaggtgcctgtagtcccagctactcgggaggctgaggcaggagaattgcttgaacctgggaggcagaggttgcagtgagcggagatcgcgccactgtactctaccttgggtgacagagcaagactctgtctaaaaaaaaaaaaaaaaaaaaagaaaaaccaatgacaatgaggaaatgttagtttcaatttatgaaatcctataatgcagattttcatggtgatgccattggtgtgaccacacagtgcgttcttcttgtctgctgcccagatagagccaatttatcaacatgggaattgcaatagagtttaatactcatagagctagctaaatgggagacaggagttttatcattccttaaatcagcctccctgaaaatttggagcatagggtttttcgaaggtagtttgataggcaggtggctagggaatgggggatgctgattggttgagtgggggataaaatcatagggagctgaagctgtcttcttgctgagtcagttcttacagatgagatgatacagtgtactagtctggatgacgccagctggttcatcagaatgcagggtctgagaaatacctccaataccaatcttaggtttgacaatggtaatattatatataggagtaactggggaggttaggaatcttgtggcctttggctgtgtgacttgtgagccataatttctaatgttgtggctgatttattagtttcacaaaggcagtgtggtccccaagcaaggatgggttcattttggggagggactgttatcatctttgtttcaaagttaaactataaagtaaattcctctcaagtttggcctacacagaggaatgaacgagggcaacttggaggttagaagcaagatggagacaggtcagatttctttcactttcagagttttctcactgtcataattttttcaaaggtcttttcattaggcaaggaaattgatttatttaggttaactagagagttaacctgattagggtttgttcaattgtgagttaatgtacactattctctttattcaaaaagttgtaatttaatcataagaatgtatctcagggataagtattccaaaaatctgtcctagacttttgagaagtttttaaaagagtaaataatattgcaaagtatactggttttttaggtgctcattcatattcaatgacagctgagagaattctgaatttttacaatgatcatttggcatgggactagaaacaaaggatccctcagctatttttgctaagctttaaattatacatatggacagaaaactgggaaatatgatgatagtctaggttcttggttgaaaacaagtttcgaaataaagtctaccttacaaaaataaaaacttaaatacatttttttgtcaaaaaagataaaaaaaagaacaaagagcttgaaggccttctttgaagactacaacaaagaaaacaaaatatgaatgaatataagaattcaaatgcacaaacgtacacaaaaatgcttgcaattcaccttattgtcatcagataaattttgccgttcacgtatctttgttgattcaaggaaaattttaccctgattggctctatgaatagaaatataataaatgtagccgtgtgatattccaaaagctggatgaaatggcttttagtatttaagcataattccagatattttgttttaataaaacaatgaaagttagcatttgtcaggatattatctgaaattaatgtaaatattcaattatttatatatctttaaagttgatgaaaatataaaatattatattaaaactggcaaaaattaaaaaaaagaagtacgtcatcatttatggtcctctttaagtcttaagaagatagaaatagtaagcttcagtactaagaagaagatcatgccaaaaaaaagagtattgttctgttcagtgttaagtattgaagaatgaacagcattgacaataactttgtttttgatcttccctcgttctattttggcactcctctgcaaaaggatttggcagatctgagcttttagaaagcttttcttaggaatgaattaagagtccccccctcccccaatttacgaattggcaacatagactagaagaaaattttcatttatatttcctctaaacgagactatcttagcttaaaacaggacatattctctgaaataagagccatccaattcattccctagtgatgctggaatagttttctattaccataaactaccttacccctgagttcagacgttttctttagttctattttacctattttctttgaaaggatattaatggtttattgatttcgatgccgccaagcttctccaagtcattcagattaaatgtacttttctgtagtcttttggtagtcattatgtaaaaaaatttggaaggcaaattgaagatgataccttttttatttaaaagacagtattgctagagcatttcttaaacttgaaagcaacattaattacagttacctccttttgtttaaatgacagatgctcttggttaatgtataatgcatatatgtgcatattctatttatcatatatattggagctactattgagaaaatattctttagttacttttctagagatactcatctatattactagtaatttaggaaacctagtccttatcatttgaacacttttgttcctgaaaccatgttaaaaactgacttctgcaaaccgaaggattgacttgattatttttatcccatcctagtatgcctcccgctttctgcttacttagatggtgacctcgtggaactcctcatgaagtcctaattttccaagtcaatacccaactgtctaagaatatttttcagccattttctttttcacagtttacctgggttatagtttattaccaaagcaatttttcccacagttgcatcattgtggagggaatctcagatttatagaatttttaaaaactttttttcttttctaattacaacttccattgaacccatactattaaaataacatttatgagctttttctaattacgaaatggaagcattctcattgttggaaatttggagagctcaggaaaataccaaaatgacagggaaacacaaaacaaacagaagcaaaatgaagtcatttgcccaaagataagtagtgtgggcccttcaaatagttattccattcacctttaaccatttatgttaataatacctcagtgatttgaacttattttatgaacagatacacaaaggcctacatggttttggcctttattttctgttctctctctctctgctttttgtttcttttgtttgtttttttgagacagcatcttgctgtgtcgcctgggctggaagctgtggtgcagtcatggctcacttgcagcttctacctcccaggctcaagtgatcctcccaccccagcctcctgagtagctggaactgtaggcgcaagccactgcacctggccaagttttgtattttttgttgagctggggttttaccatgatgcccaggctggtctcaaacttatgaactcaagctatctgcccaccttggcctctccaaagtgctgggattacaggtgtgagccatcatgctgagctgtctctcttttttatttttatttttgagacagggtcttgctctgttgcccgggctgtattgcaatggtgcgatcatggctcacagcagccttgacttcctgggctcaagtgatcctcccacctcagcctccaagtagggactacaggtgtgcaccaccacacttggctaaattttttattttttgtagagatggggtctcactctgctgtccagtctgatcctgaactcctgagctcaagcaaccctcttgccttggccttccgaagtgctgggattacaggtatgagccaccatacctggcccctgttgtctcttactacctcagttcaattctattgtcattgttttggctttatagcaaatttagacatctattttcataaaccctatagtattcttcatttttaattttttttgctcattgtttcctgtgtattattttggataatttttttttttttgagacagagttttgctcttgttgcccaggctggagtgcagtggcataatctcagctcactgcaacttttggagaaaattttgagggaaaatgtcaagtaaacaacagtttatcagattttgattggcattgatttaaatataaaaattaaattgattagagttgatctgttcatcatagttgagtcttcccttccaggagcatagcactagtgaaccctcataatagcaagttttgtagatttcttcgtatacattgtatacctgtcttagtgtctgtgtctagatattttacatcttttgggtgctgtagtgggtagaatctttgccccttgtgtagcacgagcgtatataatctaagcatggtaattgcttatattagatatgcaattaccatgcttatattgtattactatgcttgtattatatatatgtcataactggccacatcaccaaaatcatttgttacttctgggtagttgaaattcacatgtcttgagctgctgtattatataaccttctttaattttatttagttttttcaattattactttaaatccagttaatactttttgtcttgaatactacaatatttatttgtttatttgatattactttagttctttgtataactttgaccataaatgaaggcaatagggagacactatttgctcccttctacttttttcttccttcagcttccagatttgttgtatatttgatgtttttatctcagttactacctcagccactatttttaactcatatatcttttctttcaataattattataccattttatattattttattttagcagctattttggatataattctgagatcgagtagtggcaatatttattcccatttctttcatagcacttgcatattcatgagtttttttgtcttacctaacttctttgtggtaggaatatgcctccaaccttttattatttctctaggaggcataggtggcatattttgtaagtccttacgtatctgaagatatcattctgttgtgtttacaagtgaatgaaaatttgtctggatatagaattcttggtaagcatctttccccattgaaaagctgtaattttattccatacacaatattgtgaagtgatctaggccagtctgacttttaagtcttttttaaggactatgtctttatctacaaaaaaaatattaatcaggattgtctaggtttaatgaattacaccttatataaggtgaatctttttggtcagcacaaaaagggttagatttagttagatttttattcatcttggtaattttgttacagaaaacgtctgattaagctaaaaaaatatagagtgggaaaaatggctcttctcacttttctctaacacactgtcataagccaatgaattggctgggcgcggtggctcatgcctgtaatcccagcactttaggaggctgaggtgggaggatcacttgaggtcaggagttcaagaccaacctggccaacatggtgaaaccccatccctactaaaaatccaaaaattagttgatcatggtggcacatacctgtaatcccagctacttaggaggctgaggcaagagcatcgcttgagcctgggcagcggaggctgcagtgagccgagatcgtgccactgtgctccagcttgggcgatagagtgagactgtgtctcaaaacaaacaaacaaaaagccaatgaattatacatttgaggaaagaacaaattaaaaagtcctgctgtttgctgcaggataggtggaactggaggtcattatgttaaatgaaataagccaaatagagaaagacaagtagtggatgtcctcattgacatgcggaagttaaaaaattgcatcttaagaagatagaagtagattggtggttgccagaggccaggaaaggtagcagggagaggggggacaaacaatgatttattaatgggtacaactatacagttagatagaagaagttaagacctgatttccaacagatccgttggttgactatagttaacaataatctattgtacatttcaaaatagctagacaggattaatttgaatgatcctaccatacagtagatacatatttaaggtggtggatatcccaattgccctgatttgatctttatacattacatgaacgtatcaaatttacatatgcagcccccaaatatgtacatctattatgactcaataaaaaaagtaaattattcaaaaaaggaaaagaacataatttttttgatggtggtggacaaaaacgaggcagggcattttttcctgcctcctttaggcccacgccatccacttttcccacccctgtttaagcgctcaaatgttctttcttcggctgggcattcttgatggcaaatatgatgtaaatgacttcttgttcaaaggtggaagtcagaggctgccagggtggtttcctattcaatcatgccttgtgtagtgttcccaatccacaaaatcttgtccattagaccagagactgcactgcttgtccaagtcctcacagtggtcacttcagaagccactcactgttcatgcacttcttttctcataactctcactcacaaatagactgcttgtttcttattggtgcatctccttaacttgttaggaagacaaactttaactaggaactaacatttcttggtagccaaaatgtgctgtccaatacaaattcctgttattgctaggaggaattatggtttgtaaaattagctgatgctttttctcctttcttcatcttttcaagataagataaacaacaactactacaagctatagctttaaggaaagtttcttacgcaatattttgttttgtcgaatttgtttagatttcttctttattaaaatacattatttatatattgaatctccattttatgtctcccataattcttatcagttttggggggcattttgatatgttcctcccatttttcatcaatcttgcctggattgattttctgcaatgttggttctgacctttacaagttttattgtaattttagactgtattaaggcattcttctctccttactttgttttaatggttctgctaattttctttttgtttgttttttcttagctcatctttactttctctgtttggagggtccagagagttttctttaatatatgagaggataaataaatgctttctaaaatttacctgttttctgccatatttatgttaaaagtatgctctttacctcttacattttatatttattcccttttgtagggcataatatcttcatggttattattgtatcttcttatctttttcattgttaaatgaaaaaagatttattccgatcttgtatttgcccaaaaataacatggatggtttgtttctgtatctcctcaatattctcttgtacagtagtattctcccttcacatctaacattgaatggctgattagtgtaaatttatattagtgaccaagcaatttggagaaggtggagacatgggacatctaggctggaagatttcctttctggttggtttactctctgtacatggggaaactgctgttccatgggccagctttccacagctagtttcttttcctcccggcatctcctcaagaatactgcttggctgtgtctggcctccttcctggagctcctgcctgctgtttcaggcaagaaccctacttcaatggggaaagtcagattcctaagtcacttcatccaccaaaataaactccagatggattaaagatttaaatgttaaaaaaatcaaactttgcatgtactttaagaaaatagaggaaaacatttatatactatttgggcaggaatgtacattttaaatgcaatacaagggaaaattaaattactgataggtttaactatttatttctcacaacatctgtatgtgagaaagctcactccacatacagtattatacagtaaatagaaatatttataatgtaatttgatggccaaagattgagtctttatgtataatgaatttttacaaattaataagggaagcaggaaaatcctaattgtaaaacaagcaacattgatgtgatccataaaaagaatgcacaaatggctagtgacaacataaaaaaaacttacaatctcattagcaatcaaataaatgtaaataaaagcaatgaattacagttttctttattacattgataaatgggaagaaaagataataatactagttcaggacttgggaaagtgtctttccatgactgcattctttttttttatagctgcatactatttcatgggttggatgtaacttggttaatttccctattggtggacaatatattatttctctgttatttgctattactataaatactgcactaaacattattttatatgtgaataacatatggcttttaaatctacaaaatagattatcaggaatgagattgctatcactaaggaaagaaagaactacactagtccccacttatctgcagttttgctttctatggttttacatacccacaagcaaatgtggtctgaatatactaaatggaaaattcattagatttaaattgcatgtttctgtgagtagcaaatcttgtgatactctcctttttcccacccaggatgtgaattattcctttgtcgaacatatccatgctgtatatgctactcaattgccatagccatctaggttttcaggtcaaataaacatagtatatatagggctcagtgctgtttgcggtttcaggcattcgctgggggtcttggaacatgtcctaagcagatgaggggggactactctgattgctagacttatttccaaaaatagcagtcattcacatttttaacaacaatgtatcaaagtgcccctgccctacatctaattttctataataatgggtattgtcacattaaaaaaaaattcggccatgttggctgggcgtggtggttcatgcctgtaatcccagcactttgggaggccagggcgggcagaccacttgagatcaggagttcgagaccagccttgtcaacatgttgaaacctcatctctaccaaaaagtataaaaattggctgggcgcggtggctcatgcctgtaattccagcactttgggaagctgaggtgggtgaatcacctgaggtcaagagttggacaccagcctggccaacatggtgaaatcccgtctctactacaaatacaaaaagtttagccaggagtgttggcaggcgcccataatccaagctactcgggaggctgaggtaggagaattgctagaactctgggggcggatgttgcactgagccgaggtcacgccactgcactccaacctgggtgacagagccacactctgtcacaaaaaaaaaaaaaaaaaatctatctatctatctatctatctatctatctatctatctatctatctatctatataaaattagcggggcgtggtggcaggcccctgtaatcccagctactcagaggctgaggcaggagaatcacttgagcccgggaggcagaggttgcaatgagcctcaatggtgccactgcactccaacgtggagacagaatgagactccatctcaaaaaaaaaaaaaaaaaaatttggccacataatgtgtaaaaaaaatgcatagcaatgctattttagtattgtcttctctgattcagattgagtttgactctgtttatgtttattggacatttgcatttcctgttcttttttggttgcttatactttttttttttactaatatgtagaaactctttttaaaatgttaatattttttttcccaatcctctattcatctttgactctgtttttattttttatctaatcaaatatttctgatttttcttctagaatttttgggttttctacctttggttataaaaaccttgagtaaaaagtctcccccaaaatttattctcctaaattttattctatttttacttattttcacatttgtgtctttactccactcatatgaaacatgatgtgaaataatgacttaatttacttacagatagataactagttttgacagtgttttgaataaatacttttttcttactaaaatagaattctacatggaatatattaattacatgtatatattgggacctactactggacgctattgcaaccactcaattatttgcttatttcttatttgtttaagattctgttatagtgagttttaatagatgggagtcttcaacttactattgtttttatattttttaatcttcttagctatttatacttccatatgaacattaacatcattttaactgatttcaaaatggttgtgattctaactggattgcttataagtatactttgaagcatatactttttggaggatttttgtttataatactttggcatgaagtcttcttttccaaggacattgtttgcctatgtacttgttcaaatattattttgtatttaacaataaaattttacaacaaaatagagggttttttttgttgaactatcgtgaatagcaattttctgttttaatttcttgtttttgttagatataaaaatattggttttgcatatagtgtatgtaatcaccttgtacagttcccttatgaactttagtagctttattactataattattaagccaattattttattttcttatccttatttactagaatctcagagcccaaatttgaataatagtggtaataaagggtcattctgattttaatgatgtttttctttatatataaatactatatttattttcttccaatctgacttggaattcttattagaaaatatgcctgcattttatcaaattacttttagtaccatttatgaaatcatagatatatagagatgtttctttaaggtttcaatgtaatgaatttgtcattatgtttattggtcatctttggctttctgaaataaactgtacctgatgacaatgcattactctttagaaatcttgcgaatattgatttaatttgatagtattttattgacatcatctgcacatatatttaccagtgaagttggactgtgattttctgtttttgagctttattacatctggctagtttaaaatttaaaaaacaaattagaaggctttctatttttaactatagtctggaataatttaaatttcactgaaattatgcatctttcaaaagttggataattcagctgtaagtctgtctggaactagtgcctttaaaaaacaaggctttaattgccttgataatctacattattagtggtttgtatattcatttggtctatttttatcagttttggtaatttgtatttttctagagaattatccactaatgctaggctttcgaatatgtcatcatagagttgcatataatattttcataaaattttctaactctttatctggtatatctgtttttattttctgctcgcctttcttattatttctcttttctccttatcagacctgtgagaatttttgcattttattcatcctggcagcgtgaatttttgaattcttagatcatacatttcagcttttttctttgtttatttctacattctgttttcttttggtttattttgtatcttacctttaacattttaaaaatgtttacttggttccattcagtttttcttttttagtaatgatttttcagggcatacatttttctataagcaagactttatctatatcctaatgtttggggtatgaagtagtctcttttttattgtcttgtaaatccttagtaatagcagttttcttttattttcagacctaaggattatttaggaaaatatttagcaattcccaaatagtcagcttcatttttgtgaacattttattgtgcttttaaaatttatgggtttatcagtagatgtgatccatatgattttccatgtgttgaatttaagcatattttttgttcaagtgcatgatttaattaaaaaatgttctatgggcctgaataaaatatttgttctcatttcataatatgtataattatatttatgtatttatataaaatcttgtttgactgtattattcatgttttctattaattatattattaaattttttcatgtgcttacatatttttaatgtactagctgtatggtattttgaaacatgggtatgaatctctttgtcgatgactgttttatttgttaatttctcattacatttttattagtttttgctttatttattacacttacatttaatttctgttattttgctttatttaacattatttaacttttatattatatgttatgcagcatagaaaaacaatacatgtgataaatattatatatttcacacgagtcaaagcttcatgtgatgtcagctgccttcagacagatgtgtatggttttttgaacacagccctaaatttttacacatcttttgatatttaaacaggataaattctttttttgttaggtttttgaatattacatctctgtgaaatagtttctttttcttagctttaaaagagctgcactaattgttcaatagacactatgtcagcagtcattgtgttcctgattgtttgattgcaaggagtccctcagtaaaaggaggtttactgtaaggattcagatgggaaatctcaggaatgatgtcttttctaggaatgggtctacctgccctctgcttctccttggttgggtgataaaatctgcccttgcagctactcagtggaatttttgccccttcattattttgggttgcatggattgttgccttgccatgttcctgattcaccctcactgcacatttttattaccagctttacatttaaatggctgagtctttccttttcccaataccaagtatttgggagaataatgagtttgtaccagctcaaattttagtcaggcacaggctaactggctggcctgcagatgagcagacattgatcaggtccctctgtcttagcccctaccagctgcaacaagagggagtcatgtgatagaggagtaggccacttgggctgcaggggttctcagcaggcccattacaagcggggtgtggcctggacaggcagtgacagcttctcccctgtaatccactggttaccatgagggtctttaaatgaagagaatcatcttttcagtttcaaaacagaggaaatgacatttttcctctgccctgtcagtgttgggcagcttaattctaggatagtgaaaataagtaaaaatgccatattaagcactataattcataaactgtaacgtacttgtaaccagcattttaatattcatcaaggtcttgaaatgatgcattcttcttttctttactctctgcctacggtagagtgctgtacatgtatttggaaattgtgatggcattaaatatagctttaaagaagaaattcgctataaagtatgttaaatgagttttttgtcttaatgagatgcagcagaataataaaaatatgtgctcatttatggggcggtgaattcctgttgcatggaacaaaaggcaaagttcatgtttacatattgtaaatggatcttgtaaatgggtagttcttcatgggtttcattgattgaatttccttggctgatgacagaggtaccaaaaactagtgcaatgagagatctgataccaggaattcaatttttttcttgttcttaattaaccacatccacttctatatattactggccaactctaagcctagacaaaatccccaatatactcatgaatcacttgattcattactgaaaagggaaaaaataattttggcttgaattggaaggaaatgaaggagagttctaattattactcagtaaaaagctactttcctcatttatttatttctttattatttctggctacaaagctgtacaaagttcagtctgcagtttgggtagctccctctccatattttcttcttctttggtatctgtgggaggaaatgatgaatccgttcaagagcgtgctcatctctttgtgaagttgtagctcaggtccactgttgaggtccactgctaagaggcattgtttggagggaagaggggatgagatcccagagatagtgggggaaaacctggttctattcattgacttggagtgttatctctgacacgtagcctaacctgcttctttgttttgtctgcagtatcacaagaatggttaataaaaagaaaaaaactttattattcagtgcttctgtcatgtgaaacactgtgctaagcagcttgcatgtattgtctcctatacattttgcagaagtactgtgaggtaccatggatgatatgtagctggcaagttacagaaacaggaacctgggctccaaaccatgtgctttttctccctgtgactggttatagtttcaggagggaaaacagaaaatctgaatcagcacttactgtgtggtaagtgttgtagttgagatactgcaggctgctgtgtgagtacctgggtgagagagaagaggagaaccttcggagtatcagcagctgggtgatttttgaagtgtgagaatgagttgataaaggaagaaagtgtcaaaggcacattggggtatgttgctgttactagctgcagtgaaagtgtcttgagagtggcagtgggaaaggaaggtatgtgaaatagtcagatcatgttatgcaagttgcttttaaggaagagtatgtagttttttttgttttttgtttttgtttttgttttttgagacagaatcttactctgtttcccaggctagagcacattggtgtgatttgggctcactgcaatctccatctcctgggttcaagtgatcctcctgcttcagcctcccgagtagctgggattacaggtgcccgccaccatgcccagctaatttttgtatttttagtagagacaacgtttcaccatgttggccaggctggcctcaaactcctgacctcaggtgatccacctgcttcggcctcccaaagtgctgggattacaggcatgagccaccgtgcctggccaggaagagtgtgtgttttaaggaagactaagtgctgtggcagatcatctttctggctctttgtgctgctgtggtttatgtctccatttccatggacacatgatcctaccttattttcacttgcctggactactgtataagctgtaccccaggatacacacacagacacacacacacacatgcacacacccacacactatatatatactttcttgaagctggaagcagagcattgataaggtctcttctctgttcaccaagtttgtagagcctttctatggtttattgattaaagcccactttctttatcatggaagctattaaggttccaccccacttttccaactgtgtttccaatatttccctcgacctaccctgtatttttatccaatccacttgttcctgttcccatcctgtgcctttatttacatagttctctcatggaattcctggggttctttaccttgccacatatttggatctgcaaagtctaccttgtcaggcctagtgagaactgtgacggctgcttcttaacccactagtgagaccgttggcacccttcagaggtcttgagctactgctttttcagttctggggactttcctagcctctaccttctactttccacttttactcatctagttttccaagtctccatgttgttgtcaagttcctggagatctgttgctggggtttgtgttgttttctcctcaataccccacctcttgcctcattagcatttgcactgagaggactcaggaccagtggctcctgactcctgcgtcctggacaggctcctggatactttatcataatccaagctcagcatcccttttgacttccaattttcaaggatgattggtctgaattccatgagcttcttgatttattttgccatttatcccttcaacaaatgtttattaattacctactttgtgtcagactctggaggcatagtggtgagtcatacagtgggcatggcccctactttttgttaaacatatctatggaaagagagcaatttacaaccatctaaataaatgtaagactggtagagagtgtatgatgccatgactgcttaccagtgggagatgggacctaactaagtggtaaaaaaatgcttccttgagaagtctccagcgctgatacttgtaatcactcttaggactgtgtactcactgatacttgtcacctagtaagactgtgcactaactttgagctgtggttcatccactgcaggtccttctgaacagttctcagagatctccgaccttctagctttgggccatttaccttgccccaactctttcccttaggtgttaagacattagtgatgttttggtgatccggtgtctaacattttccctctaatgtctaccacttaatgtcatttgtcctcagatcaagtccaggcctacatgtttcacgggactgtttgtacctttttttttttttttaatctccaaaatctcgtggaacacaattaaggtggatttaaaggcttctaaatcagtcttaaatttgtaatataagctaactgcaatgtggtgggggtggggtggaattctgttgtgtggtcctgtgtttatatgttggcagtattttgtcagtatttagaatagggtgtaattaaattttcaataaagcaattatttattgactagcatttttgagttgttggtattgaggcaatcactgctaaaagttaccatatatattatttcatttaatcctatggaaaatctcaacatgtcttccatggaatcttgtataaaaattttcttggtcgttttacaatttggccaatgccttctcatccagcctcatttcccactatctttcatccttttgtctggcattgtatatgccacatttgcaaatgtcttttttctttacttagaatgcattcttttctcttcacatcagaatcctaaacttgtagtttttactctttccaggacatttcagtcaatctgtatacaatgtaacctttggtgttgtccttaaataaagtaggcactcaatgaatatttgttgaattaaacatcaggtgtcttgggtagatttgttaatttatcacatttaaactaagcagatgttttgtaatagccatgtaattactgtgatttgagatgatttgctactctttatccttgccattttagagaattaaccagttgtccaaaaaaaaaaaaaccaccaactccctaaaacatataatcactaagaatctctactacttcattcttcattttgagaaatgttccatgatttaataatacttatattatctttaaataaagcaagtttcagaaaaactaatttaagtgctacttgctcatagatgctgaatgttatgaatgaatggatcctatgagataggttctacataattttattatcagtttcaaaatgagatgcctgaggcacagagaggttaaatagcttgcctgggtgacagaaactatcagttggcagaactgacagctttacctatgtggcttcaacttctggcctatattcccatctctgctaacagttatcagaggtataattttaaatggagtctcatttcttatttaatttcattattacttttaggaacccacccttttaggaatagctggacttccaaatactgtgattagtgtctgtggaaagatattaatgttactgctgatgcatgtcatattcactaagaaagtacatgtcaaactgtctgaaatcatagactattttataggaagagatgtgactaaatttatttggcaataaattcccagaatatatttatcaatttaagtaaccaaaagctattatataactttgctttacagtacctgttcctcaacataatttttaaaaatctttttccaaatggtcagccgttgctttccatttcttttcacttaaaaaaaatttttactaagaacacacttgccagatttcacttaattgcatttttatggtccagtcattaacctactgaaaaaaaagtagcttaaatggaaacattgacataaacctcattacactggctccaatgtgttgctatcataaactatccatcttctatatgtgtatgttttcacaggatactattgaaaaggtaatggaaaattaatgttgcaatggagaatttgattctgtgtataaattttttaaacacaccaacacagtgtatgtttacaacatcaaggggtttatttggaattaaggtttatcataaactttatgatatttaaaacacattacaactggccatatattatttcaggtccctgttttcaagtttttctaatttttttgacaaaatatttgttatgtgtctctctttggactggtaacagacaactgataatcattttcaataagaaaaaaaaagttttaggatcttaaagtggtcaatctatcatactttcccctgtaaattattttttggcatttacattttaaggcatactctgccgtggttggatagttcctcaaatgttaaaaacagtcgagtccaagataatcagttaaaatcatttaaataagcactattgttattactagcctcactgttttcagcacaggggcttatgtagttttcataaagaaagggagcaaggtatagaatgaagaattgagatggtgacaaaagtattggagtatgtcagcgcctggaaggccatttctttttgcacatacttgatatgtgtgtaggtgtgtggagagcagtagaagaatttcatgatttatttgaaattctataagcactgcctgaataatctaagaatcctaggtatctatttgtgaaacatgagaataaatgagtacttttcttctggatcttgaggttctatcagattttaggtgatttggaggtaggggtttgtgagcattaatctttttaagctgtgtaactctggacaagtcactttacttctatatgtttcagtttccatacctataataattcgtagccgatgaagttgccacggggctcaaatcggttatcaggtaataatgatttaataaatttaactactattattatttaaatagtgagtagatttattttaaattgttttggaggcaaaatggcagagcagagtttgacagacttaggttctcatcctggtttcttatttaacagttgttcaactaagctaccattctttctgaggattggtttttttatgaggaaagtgtgataattatacatattttgtagacttattgaagaataagattatgtatgtaaattgccaagcatagagtcagacccaatggtaggtactcaatgaatgggagctattgtaattatttacaaaaaacacagtaatagagtgggtacgtaaggaccccatgtctttataaaatagcattactttacccaacaacataaagaaaaaagtcagtgttctcagaaactcatgtagttgaacatttctctcagccaaaagaaatatattacagtgtaagtggttgtaaatgctatgttctatttatacatgatgaaggtgttgtgaactgtggagccacagtttaaatattgtgtgtgtgtgagggccttcttgtttcttaccttataaaatgtcctcattttaaatgtctctaagtgcatgtaaacatggccccaaacactcataataaaataagcaagatcttctattccagaccattttctttatttttttactgttttattacaatcctcctatcaggatctcatgtttgatcgtgaaatcacagaattttatagctggaagggacttgtctaacaccctaaatttataggtaaaaaaactgccacctgaccaatttaagtgatttgctcaaggccatatagtaagttagtgtcggaatcctgatctcttgtcttcaactccataacattttgggaagagaaatgaaaacctgtttcagacacaattaagcttttttgtttttttaaaacttatgagaggcggtgctggggtctacaaagtgactctcagctttctgctgaaaggaaagattggtggggagccttagttgtggggatccttacctggtaacagagactgcccttgtggaattacctagatggagccatacgccattgataatggatattgtgatctcaggtatgttcacataacaattatccaaggatatcaggttaaaccagaaaggcagtatctggtggggttccaagtagtgggatagcagattcaaagtcagacaagcaattgcaccttagttccagggaagccttgttaatgaatgcttggggaagttgcttatctttcagcgcttctgtttcctcaacagtaaatttataataatacatatatcttatggttgtgctgatgatcatgcaaagtaattgataaaatgaatttattataatgtctggcacatatcttaatcacttaataacttaaagctaccactataattccaggtgatcagtctcttcacagtaagagacttgttacagggagataagctctattccttgagaaaggactgagagaagttactcggtattcagagtccaagctcagtcacccacaatttaggataacattttagtccaaacaagtcttgggggtacttactggagaaactgaggcagaaacctctcccatgaaggaaccaacaaggtagataattggtttgattatagcacggagactgttatgatttatggtatatgcgtgtcagctggatatatctcagacttaccaggctctaagacaaatttcagtgaccctatcctgattagattcaacattcaccagtgggctttcattctggaatcttttagaaagatgacttattctctatgtcctcaagtaattaaaaactacttccaggaagagaagctacatagaggctgattttaatttaaaataaagcacctcttcagatgagcagaaatatccgtttaagaacttggttactttggatggtattgacttttacatcaccgaaggtgtttccatagatggaagacagccacactgtggggattctggaattagatttcaggcccttaaggttttataatactacagaatctctgggtttatgataagtgaaagtttatggaaatagttggggacaaagtatgagtagaaggtacagaagtagaaaagaatatatatattttaagaatggcacatttaatttattattttttaatttttaattttttttaagagatagggtcttgctctgtcacccaagtcgtagtgcagtgttgcaatcataagtcactgtaacctcaaactgctggactctagcaatcctcctgcctcatccttctgacttgttaacttgttagaattacaggcatgcagctaatttttaaacattttttgagacaaagtctccaccctattgcccagaatggtcttgaattactggcctcaagtgatcctcctgcctcagccttctaaagcattgagattacagacatgagccatacaacccagctaagaatagcacattttaaattttgattgagacatatatgtccaggaattttgagcagagagattggacaggctaatcaagattaaactgtggggagttccaaatgtctagttaagggatttgggtttattttatgaaaacaagtgataataattatgatcctctatggataattctcacaaagttctataagatggtcgttatttatatattatacaagacataactaaagttctgtgactcgtctagggtcacactgctaagtcagtggcagtactgggattcagactcagctctgtccaacttcaaagtcaatgtcatttcccccttaacatagtgtggacattgtatattctgtttatttttcagtgattactttaaaaaactttaattgttaaatagttgtctttatgttcctttgaaacattatgagcaatgtttgaactccactcattcctcagtttgcatattgttgtttttcagtatttagttccacctcggtttttattttaacctcataatcagtcattgtggtggtttgggttctccgagaagcagaagacgacaaggctgaatgtcccatgccaggggctcactgggaggaattcctatggagcaagaataggcagagaggccttccgattgtaatgcaggatatgacatctgggaagggagagtcaaagaaggaagatggggagtgatatggtttggatattttgtttcatgccctaacatactctggagaatattccagtggttcttgagaagaatgcctattctgatgcagggtaggaggctctctgtatgcctgtgaggtacatttattccatagtgttcttcaagtcttgtttcctcttatctgtctgaatgttctattcgagattgaaaatgggttattgaaatctagtattattgtggtgttctctttatcttccttttgctccatcagtgcttgtttcatatattttcataattgctgtatcttcctgataaattgacccttttgttctgtaatgtccttctctgtctcttgtgacagtttctgacctaacatctattttgcctgatgtaattatggctacctctgccctcttttagttgacatttgcatgaaattcctttcttcatccattcacttccagcctatgtgtgtccttaaatttaaaatgaatctgttgtagacggcatatagttggatttttgaaatttggaattcaggcactttaatgtcttttgattggggagtttaatccattgacatttaaagtaattaccaatagggaaggacttaccttgtcacttttaaattgttttctgtctggcttgtagcttatccccgtgttttcctgtcttgttgtattcctttgtgtttaatttatttttgtagttgctctctctctttctctgtctctgctgtgtgtgtgtgtgtgtgtgtgtgtgtcctgtgggccttatgtaaaacatagcaatacattttaagctgataacaactttaattgcatactaaaactatattgtctccacccatttatgttattgatgtcacaccttacagctattttatactgtgtatccattaacctgttttattgtcatggttgttttttatgcttacaacttttaacttctttaccagcattaaaaggtttacataccaatgttacagtattacagtattctttgtttgtctatatgtttgtcagtgagctttaaactttcacactgtttcatattgctatctaatgtcctttccttttaccttggtggactccatttaaggcagatattgagaggatacctcttgtaacgcaggtctagtagtaaagaattccctcagcttttatctgggacagttcttatttctcctcctttttttctttttaaaataaaaattttaattgtgtatatttaaggtatgcagcatgatgttatgggatacatatagagaataaaatggttactatagtgaagcaagttaacatatccatcatctcacataattaccgttttttttttgttattgtggcaagagcagctaaaatctacacatttagcatgaatctcatatacagtacaattttattacctatagtatttatgttgtacattagatctcttaacttgttaatcctgtatatctgctattttgtatcctctgaactgcatctctgtattgtcttcccttcttcccatgcatggtgtattagtcagggttctctagagggacataactaataggatagatgtatatataaaggggagtttattaatgagtattgactcacacgatcacaaggtgaagtcccactataggctgtctgcaagctgaggagcaaggaagccagttcaagtcccaaaacctcaaaagtagggaagctgacagtgcagccaaccttcagtctgtggtcaaaggtccacgagtccaaaagctgaagaacttggagtccgatgtttgacgacaggaagcatccatcacgggagaaagatggaggccaggagactcagccagtttattccttccatattcttctgcctgcttttatcctagccacgctggcagctgattagatggtgcacacccagattgagggtgggtctgcctctcctagcccactgactcaaatgttaatctcctttggcaatatcctcacagacacacccaggaaaaatattttgcatcattcaatctaatcaagttgacacttaatattaaccatcacacatagtaccctctcttttgttctgtatctctgtatataattggatttttagaaatttagatgccacatattaagtgagattatgcaatatttttctttctgtgtctgacttatttcacttagcatgatatcctccaggcttatctaagttgtggcatttcgcaagttcttgttcttttttaaaagctgaacaatataatattttgtgtaggtactaccatttctttatttatcgatgaacattagattatttccatatttggctattgtgactaatgctgcaatgaacatgggagtgtaggtatcttcacaagatggtgatttcatttcctttgggtatatgctcagaagagggattactgggtcatatgctagttctatttttaatttttaaagaaatgtccatactgcttttcataacagctgtaccaatctatattttcaccaatggtatacaagagttctcctttctccacactcttaccaacatttgttatcttttgacattttgattgtagctatcccaatggttgtaaggcagtatctcatagtggtttcaatttgcattttcctgatgattaatgtttttgagcaccttttaatgtacatgttggctatttttatgtcttctttagagaaatacctgttcaagctttttgccttctaaaaatcaggttgttttccattattgagttgcgtgaactctttatcaattttagatcttaacctcttatcagatatatgttttgcatagattgttttcccaatctctaagttgctggtctgttttgtttatggttttctttgctatgcagaatcttttaagtttgatgtagtctaatttattaatttttgcttttccttagtttttggtgtgatatcaaacaaattactgcctatgttctcttctaggagttttagagtttctgatcttatatttaggtcttatacccatttttagtttatttttttcagggataagataatggcctgtgggccgggcactgtggctaacacctgtaatctcagcactttgggaggctgaggcgggcctcagcactggaggtcagaagttcgagaccagcctggccaacatgatgaaaccctatctctattaaaataaatacaaaaattagctgggcgtggtggcacatgcccgtaatcccagctacacaggaggctgaagcacgagaatctcttgaacccaggagacggaggttacagtaagccaagatcacagcactgcactccagcctgggcaacagagtgagacttcgtctcaaaaaaaaaaaaaaaaaaaaaagttaatggcctgtggatactgaatttcctggcaccatttattgaagagactatcctttccccattttgtcttctctgtgcccttgggaaaaattagttgacagcatatgtttggtattattcagtatttctgggttgtctatattttccactggtctgtgtgtctgtttttaaggcaatatctagtgtttttactactatagattagtaatataattttaaatcaggaagtgtgatgcttccacctttgttttctttctcagaattgttttggctatttggggtcttttatggttccatatgaattttagtattttttttctatttctgtgaagaatgccattgggattttgataggaattttattgaaatctgtatattgctttgggcagcatgtacattttaagaatattaattcttctgatccatgagcataggctatattttcttttattctgttttcagtttctttaagcagtattttataattttcagtgtagagttctttcactgcctttgttaaatttattcctaagtattttgttgtttttcatgttattgtaaatggtgtaaactctttaaaggtcagtttgtattttattggcattctcagtgttggttctatttagatattttattttttatgccgtcataaatgggatttttaaaaatgtctttttaatttgttatttgtgtataaaatgctgatagtttttgtttgttgattttatatcctgcaactttactgaatttgtgtattaattgtaatagtttcttttaggtggaatcattgttggttttttcccccatataggattatgttatctgcagatagggatatttttacttcctctgttgtgatgtggatgtcttttatttctttttcttgtctgactgttttttctagtactttcagtactatgttgaatagaagtgatgagattgggcatccttgctttgttttggatcttagtgtaaaacattcagtttttcccaattgattataattttacctatgggtttttcaaaagtgaagtgacttttattatgttgaggaactttccttctatagatttcctcatttttgaaggatatttttgctgacatagtattcttggttagaatttttctttcagcactttcaatacattatcctattcccttctggtcagtgaggttcctgctgaacaaacccactgatagtcttatagagactcttttgtacataatgagtcaattttatcttgctgctttcaaaattctccttggccaggtgcggtggcttacgcctgtaatcccagcactttgggaggccgaggtgggcagatcacgaggtcaggagtttgagaccaggatgaccaacatggtgaaatcccatctctactaaaaatacaaaagttagctgggtatggtggtgggcacctgtaatcccagctactcgggaggctgaggcaggagaattgcttgaacccgggaggtggatgttgcagtgaaccaagattgtgccgctgcactccagcctgagcaacagagtgagactccctctcaaaaaaaaaaaaaaaaaaaaaaaaaaaatcaaaattctccttttgtcttggtctttggacaatttaatttcaatgtattgcagtgtagatttctttgtgtttattttagttcatgagttttgggcttcttgaatctggatgtctatttccttccctgattttgggaagtttttagccattatttcttcaaataagtactttatcctttctctctctctctctccttcttctttgtgaacttatataatgtgcctatggatccgcttgatggtattctgtaagtccctaggctttattctcttttttcattcttttttctttttgcttccttgatgtgataatttacaatgacccatctttgagtttgctgaatatttcttatgcttgatcaagtctgctattgaatctctgtagtcaattttccaatttagggattgttttcttcaggtccaaaatgtctggttcttcattatgtgttgtgtctccttgtggagcttctcattttgtttatgtatcgttttcctgaggccattgaacatccttgtgatgattattttgaattatttgtcaggtaattgatatgcctctgcttctttaggtttgtttgttatttattctggtcctttgattgggtcatgttttctttttttctttttttttttgtcttataacttcttgttgatatccacatgtttcaaaaagtatgtgacatataattcagattcacaagatgtaagatgccattaggaatgaggcagttgcttagtccatatctctatttctattttgtagtcttgtctcagttttagagtttattagtcttttggtcttacttagttaagccgaatatggccatctcatctccaccttcctgtttccttttgaatcttcaagctgatgcagttgatttgtgccaagtaaacctactggctggcatgggagtggtgctcatgctattctcttcaaccagggaagaggaatgctcagttgcatgatgtatagagctgcttctttaaggtgtttggggtggaatagaaattaaacgtatctaatgtaattgggaagaagaattatagtatttggggaggcatgcaaagataaattattttcagcacattctgttattgtgcataaaaatatttacatattctccacctttatttatagaacaggaatcccagagaaactgaaatataataattactcacacagataaatgaactctaaaatcaaacagaatttcttggctacccttgatcttttaactaatataacctgttataataactttggggcgggcatatacataccacgtatgttattataagtggttttagagatctggaaataattattgctttcttcaccttgtgacctactaggatgacttactaaatttttttcgtgttgttttggaggaatgttcccatttattctgctgttaacttactttggaagggataacttcctagttggtctaaattttgttgcaaaccttacataacactctcatgaccttaatcatggtagatgtgcccatgtgagtccaattcttttgagtaactaatgattgaaaggtatgtacagaatactattcagattgtatcttgttttttcttgtatttcatagagttcaatagttgaggtacatttggagaccttaatcttctagcagtttatcatggttccttctgttgaataaggctggtcccattttttttttctcttcttatagtcacacatagaatggtgtaatgattttttcattggcagattcaggctgaacttcatatccagattcatggggacttgagaaggaagaacttaaaccatgctcatgtctgtgatcttttaccttctaattattagtttcccaagaaaagaattagtcatatagtctttaagtattgtggcttatcatatagttctttctaatcatatagtagtaatttatccttctggtatctatcttaatctcacatgcattttagatgccttgagttaggcttccagatctgatcatccagtacaagaagtgagtcctataaagaacaagtccagaccctggaatatggcagtctcctcaaggtcctgccaggtgcttgttgcctgctaccttttccatcatttttttcagttataaatgtctatacatatatcagatagagccttcccctatgctttttctgatgctggggttgacttgttttaatatttggttactccatgagaatttcacctgctgctgtgggtcagcaggaccctcccataaggactcattttctgctgaatgagctgagtagccattcacacttcccatagttcgccaagccgaaagatgttttgagagtctgtatactttagattccaaccctctgtacaggaacccaaatttggatggcaaatatattttattatcagtgtatatcctattacttggtagtagctatgtggaaagggtacaaaggctgaccctctatgcttcaaggccaacttttggccatggtaagaagaatgagaagtatctaataagaaggactgaggtcctcattgttccaactataggacatacctataaatcctgatagaagtatattcagcatgtcactttaactaatattcatccttaaacttgggtgatcatctgtgaggaaggaagtttggggaatctattgttagcatgcttgcctttttcagttggtccttatctttgattctctgaaactctcctctattttatgcttacagttttgccaccaaggcttataatgtctcatatttcctgaattacctgggttgctgtgacacattgacattgatttaaaaagtgtattgggttctaatatcccagatactgtcttagacgcttaactaactagcatcttgaactagcatttaagttgctcttatctgatattcagccacctaccctccccagagctcactctccatgcttgctctacctttgttcaatggcttgggcttctgcttttgcctatattctctgagtttctcattgagttaactgtctggttcctgtccctccacgctttgccttgctatcacaattccttatatgagaatttggtgctgagtttctgagcctcatcctcatatctgggatcctgcagcctgtgactctctatatatctcttgggccatttaactactgtgagtttcaagacttttgctatcaaaatttttcatctcccatatgccatactttatcttgctgactgctttcttttcttttcttttctttttttttttttttgagatggagtcttgctctgttacccaggctggagtacagtggcacaatctcagctcactggaacctctgcctcctaggttcaagcaattctcctgcctcagccacctgagtagccagactacaggtgcgcgccaccacccccagctaatttttgtatttttagtagagacagggtttcgtcatgttggccaggctggtctcaaactcctgacctcaggtgatcctcccacctctgcctcccaaagtgctgggattacaggcttgagccaccatacctggccatgactgcttcctagtactgcacttactcaaattttccatactctgggatgaaactctgctgtcacctgggcctgtactctaatgccactttaggtctagtgggcaggcctaatttcagggcctcccccaatctctgtctcactatgtatactctgtgttttctcattgataaatccagagatatgatgaacagatatgcttgggaaacattattggcaatacactatataagccaatttagaatatttttattgtaactatagttactatttttttctagcttgattctttgcttgtaggtagtgaaatgtggtgacagcttgactaaagctctgttctataaatgcctttagtctgaggtaaatgtaggctttgtcagaaatgatattttcatatatggtacatagatggtacagaactgtgattattgtaacatgtttgagatacaacaaagagtacttaaaaatatttcatacgctcaaggaatttttaccttgggttgttcctgaaaaatcaatatggtcccttgtctagcattttttgtgtagtttctataaagtagtagctgcttttggtaggctattcaaaataatctggcttagcattcttttggaatttttaccttggggtgttgctgaaaaatcaatatggtctcttgtctagaattttttttgcatagtttctgtgaagcagtagctgcttttggcaggctattcaaaataatctggcttagcattctttataatacagttagttcaggtttcttaaaaccagtttttggcctatattcctcaggaagaaaaactctgtgtcattttaccttgtgcccaagatacatgataactgccttcttgaataacagcaggctttctaggctttcttcacacaaagttttctttatgagaaaaataatatccattgacaacacgtaaagaatagaaaatatatgaggcagttgcccatttccctccttgtcattacctccacacccagtatcagaaatggagtgattgaaaatcctacatatgttggattggaagtaaaatttaatttatttgaggaacctcaaggatatatgtgagcattccaatttcctattatggaattagcaaaacctagcctggatctggggcaggaaatcagtatataatgttgctttcaaggttactctagaattacctaattcaaagcaagggcttatatttagcaatgagctctcaacatggtttgttccatgtaaaaaatgtcctgccaatgccaaattggtagtaggtgaagttggagactccagggctcatctaccatttgtggcattgttccatccatagatgacactgttcttaatttgtaagcagagcagtctgtgcctcattgccatctggctcagcccagttccagtgccataaggtgaactgaactgtcagtggtaggaaatagtgctctatgtttgtcatgatgtactagcacagacccagaagtcaataactgcttggcattccagaaaacattctcatggcggtgagttaaacttcatggaatgtctttttccagtgggtgatgaagtcatttagcaatggttaccttttgtggaagaaaatcttgttaaaaagtaagtagccctgggaagccttgaagtttatgctcttgttttgaagtagacatactacaaattttttgtattttatttaagccagggaaaatactagatgcactgatgaagtaacttaagaagataacataggaacttcgagttgtacatttttttcttttcccacttgattatatgatatattgtgttgacatggacttctgaaacccctatgttttcatctttagtcagctttataattaggatgtcatcaaatgaggctaacatgcctggaagcccagaaagcaaagtccctgggaaggagtagaaacttccaggagcagcagaaattctcaattgaccttctcaattccccgccttcacatctgctccacagtctgcacttctgtatcttatatctcaggggtggtcacatcttctgtgtggagctgctctaaatagagaaactaaacactgaacctccattccctctccttttgtgtctcctagtttgatcatgaagttctttagttttgtcgtgtcatcaaattccttgacccatcattattttctcagtcttgtaaaagatctccctctccaggagaggaggtttctcacgatgagcgtatgatgaaaatgtgcatttgtgtttggtttccctatcagtgaattttgttgtgccagaatttgcacagcttctagtgagaaggatgtctttcttcgggagtaatacaatctggtctcctgtgaggcaatgcttggttttgaccttgtcctttaaaaattctagacacttgcccttgctgctgtctccccacatcatttcattcagaagcaattgtttcttgaatttcttacaggagacagtcctgactgtttacagcccaattcgctgcgtatgatttgagctctccctgtgataaagaatctggtagtggtgtgtgtgcacggcatgttatcacctggtttgctttctgttagagtgaggcaaccaacagaatgaggagaagagaaggaggagtgatttgcagggccagtgaaggcctgggagtcaagacctaagggcttagaattcactgaggagttcctttcttgtgggaccaagtacagtagtaattatataataattataatatactataatatactactgtatatatagaaagtatatatgtagaaattgtgtgtgtgtatatataatatggtatatatatatatggtatatatatggtatgtgtatatatatatatatatatatatatatatatatatatatatatatatggatagagagagagagagagagttgctgctgtctcatagcagcaactattttatgtacttcacactgtggatctctaggcataacccgaacctgcctcactcctttaatcactgattgaagcattctacattctaaccatccatcgtctcttgttctttcaccttacttattcagctactcccatcgtgactactcctacacctcatcaggacttctgacccactgagacacctccccatgcctagccataatctcctatctttaccactttctttcttatgcagctagtctgtggctcattgctcagtaacattctggcggattttcctacacatatatctttttgtcatatccatctggcaacatcctaaagctagtgaatgtaaatatactttagtctatgtctggatagctgagagatgatagagaaagtcactcagttgggctctcaacatgtcagtattccagttgtgttaactggtcccggtgctacgccactgtcttcagtgatatgtcagaacttctctactcttttttagtctttcattctcataactccccaatcttctctcagttaataagaaggtagaagcatccagtgggaacttcctgagtcctcctcgacatgggaactccatctgcagccatgctcatgctgtgctttcagtccgtgctcatccctgcgcttcacagccagactgctcaaacagatgtctgtgtgtgcttgctccctttccttaacagttatggagtccgtgattcatgtcaaactgcattctgttcgcatcatgacaccagacacctcttgctgatgtaatggaagtctactttgtaggcattcttcagtcctcatcttacgctctgagtacttctgcctggatttcaaatgggagaggccttcagactcctcacttaactccctttttttcctactctgcagtgtgaactttcttcctaaatgatttggtccatgtgatgacttcaattatagataataagcaaatgagtcaaattttttgtctgtgtgtgtgtgttttttttttttttttttttttttttttaagactggttcctgctctgttgcccaggctggagtgcagtggcctgatctcagttcactgcaacctctgcttcccaggttgaagtgattcttctgcctcagcctcccaagtagctgggactacaggcatgcaccactacgcctggctaatttttgtatttttagtagagacggggtttcgctaatgttggccaggctggtctcaaactcctggacttaagtgatccacctgccttggcctcccaaagtgccaggattacaggaatgagccattgcacccagccaagtttttatccacagttcagactttcacctggtacccaagtcttactcatgtgaacttgtcactggactatctcaaaagctccttagaaacttaagcatcatcatgacacctttttcccccttagatttcaactctcaaccatgatattcatgatatttaccaagtcagtaaattttaccatctcaatctatttctagggacttttctaggatcacttttctagggactctttcctggcttcagcgctcccaaccaagacaacattatgtccacctctcctaagatctcattgtttggggggctgaggttggaggattgcttgaagccaggattttgagaccagcctgtgcaacacagtgagactccatctgagtagtcccagcgactcaggaggctatgtgaggaggatctcttaaacctagcagtttgagactgcagtgagctaggattatgccagtttactccagcctgggtgacagagagagatgctgtctttaaaaaaaaaaaagatctcactgggttttgtacttttcttttccagtgcctgtcactgtttgtaattacttatgtgaatgtttgattagtgtctgctactttattagaatgtatgtctcatttgtcttgtcattttctacccattgtacccagagcctagcacatagtgagttatatcaacaaatatttgccaagtacatgaatcaatgtactttatgaacttagtcaaaataattttaaaggtaagtactgatgattcctattttagagatgtcaaaactgaggctcttaaattatgtaaattgtctaatatcacacaggttaattattaataaatgtcttgggtgggattcattttgctattttatcctccaggccttactggggtaaggttggctttttaaggatcttagttggaccagacattttcttcagagtttcagtatgaaatttaataattttttatttgtgatattaactatgaaatagggcttgatttgaatacaaaacaaactaaaaaaacccctccagtttaaatgaacttagaatgttgaagcaaattttgaaaaagatattttgtgtcattaaaaacaatgctatttaaaaatgcttgtgataggatgttaaaaaaatgcagtccagaaattcatgtatagtaagatattcatgtaactgcatgaccagttcttcttgcctgttgcagagatggagccaatttgctgaaacagcagtgttacagtagagaaagagtttaataatcacagggccagcaaagtgtgggaagtatgggagtatgggagtttggaagtatgggagacatttctcaagtcagcctcccaaacagcttggagtttagtgatttaaagagtaatttggcaggctgagggagagggatttggtgctgctgattggttggggatgaaatcttagcagtgtccaaattatcttagtactctgagtgagtttctgggtggggggtctcaggactggttgtattacttccttcatatgactcatgggtctgggtagagttaagtcattcgccagaatgtcaaagtctgaaaaatatttcaaagaccaatcttaggaggttttgacgatagtgatgttatctataggagcacttaggaagtcacacgtcttttgacttctgaaatagtaaatccttatagaaaggtaagcaagggaactatgctggttatcatttcattaagccatatcttagcagaattcaagtcccttctctaatgctaatattgtattctttcattactcttaaaaggcagttttgatccctgagcaaggagggctcttggaagggactgtaaagttaaagaagtcagttagcttgtgaaattagaaacaagatggagtcagttaggttagatttcactcaccaataatttttctgtcatatttctctcaaaagtagtttccttaataatgtaaaaacacatacaaagaaactagaaagaagaatgctacttaatagttgcttcttctgggtgatgatatcatgcagtttttttttccgtcttatatttttctgtacttccccaattttctacagtgataacatattatgttttatttatttatttttgtctttacataggaccatttaatgccttctttactagaaaagttgttgatggtaatctagctcatatactttacctgggagttgggacttgcaaaatggcttaatttggtagtttccaaaccttgttaaaaagcttaaaaagtcccaaattcttataaaaagctcatttttaaaaattatactttaagttccagggtacatgtttacaacgtgcaggtttgttacatgtgtatacatgtgccatgtttgtgtgctgcacccattaactcgtcatttacattaggtatatctcctaatgctatccctcccccttccccccacaccatgacaggccccagtgtgtgatgctctccatccaatgtccaagtgttctcattgttcaattaccacctatgagtgagaacatgcagtgtttggttttctgtccttgtgatagtttgctcagagtgatggtttccagcttcatccatgtccctacaaaggacatgaactcatccttttttatggctgcatagtattccatggtgtatatgggccacattttcttaatccagtctatcattgatggacatttgggttagttccaagtctttgctattgtgaatagtgccgcagtaaacatacgtgtgcacgtgtctttatagcagtatgatttataatcctttaggtatatacccagtaatgggatggctgggtcaaatggtatttctagtttgagatccctgaggaatcaccaccctgtcttccacaatggttgaactagtttacagtcccaccaacagtgtaaaagtgctcctatttctccacatccactccagcacctgttgtttcctaactttttaatgatcaccattctaactggtgtgagatggtatctcattgtgattttgatttgcatttctctgatggccagtgatgatgagcattttttcatgtgtctgttggctgcataaatatcttcttttgagaagtgtctgttcatatcctttgcccactttttgatggggtgtttgattttttcttgtaaatttgtttaagttctttgtagattctggatattagccatttgtgtgatgggtagattgcaaaaattttctcccattgtgtaggttgcctgttcactctgatggtagtttcttttgctgtgcagaagctctttagtttaattagatcccatttgtcagttttggtttttgttgccattgcttttaatgttttagtcatgaaatccttgcccttgcctatgtcctgaatggtattgcctatgttttcttctagggtttttatggttttaggtctaacatttaagtctttaatccatcttgaattaatttttgtataaggtgtaaggaagggacccagtttcagctttctacatatggctagccagttttcccagcaccatttattaaatagggaatcctttccccatttcttgtttttgtcaggcttgtcaaagatcagatggttgtagatttgtggtattatttctgagggctctgttctgttccattggtctatatctctgttttggtaccagtaccatgctgttttggttactgtagccttgtagtgtagtttgaagtcaggtagcgtgatgcctccagctttgttcttttggcttaggattatcttggcaatgcgggctcttttttggttccatatgaactttaaagtagttttttccaattctgtgaagaaagtcattggtagcttgatggggatggcattgaatttgtaaattaccttgggcagtatggccattttcatgttatcgattcttcctatccatgagcgtggaatgttcttccatttgtttgtgttctcttttatttcgttgagcagtggtttgtagttctccttgaagaggtccttcacatcccttgtaagttggattcctaggcattttattctctttgaagcaattgtgaatgggtgttcactcgtgatttggctctctgtttgtctgttattggtgtataagaatgcttgtaatttttgcacattgattttgtatcctgagactttactgaagtttcttatcagcttaaggagattttgggctgagacgatggggttttctaaatatacaatcatgtcatctgcaaacagggacaatttgacttcctcttttcctaattgagtaccctttatttctttctcttgcctgattgccctggccagaacttccaacactatgttgaataggagtggtgagagagggcatccttgtcttgtgccagttttcaaagggaatgcttccagtttttacccattcagtatgacattggctgtggatttgtcatcaatacctcttattattttgagatacatcccaccaatacctcgtttattgagagtttttagcatgaagcgctgttgaattttgtcgaaagccttttctgcatctatggaggtaatcatgtggtttttgtctttgcttctctttatgtgatggattatgtttattgatttgcatatgttgaaccagccttgcatcccagggatgaagccaacttgatcatggtggataagctttttgaagtgctgcttgatttggtgcagaaggcaagaaataactaagatcagagcagaactgaaggagatagagacacaaaaaacccttaaaaaaatcaatgaattcaggagctagctttttgaaaagatcaacaaaatagatagaccgctagcaagactaataaagaagaaaaaagagaagaatcaaatagacgcaataaaaaatgataaaggggatatcaccactgatcccacagaaatacaaactaccatcagagaatactataaacacctgtatgcaagtaaactagaaaatctagtagaaatggataaattcctggacacatacaccctcccaagactaaaccaggaagaagttgaatccctgaatagaccaatatcaggctccgaaattgaggcaataattaatagtctaccaaccaaaaaagtctaggatcaggcggattcacagccaaattctaccacaggtacaaagaggaactggtaccattccttctgaaagtattccaaacaattgaaaaagagggaatcctccctaactcattttatgaggccagcatcatcctgataccaaagcttggcagagacacaacaaaaaaagagaattttagaccaatatccatgatgaacatctatgcaaaaatcctcaataacatattattttttaaagttcttatttaagatgtttattaaataaatactgtagcagtaacagggaacaaataattattaaaaagaactcctaatcttacctgaatctttataaaatctatttgataatctttaggctgattatattctgaggctcagttgccatgagttcttcacttttcaatgatcattgactagttacctttgcataaaattattatgtttactggtttgttttaaaggatattaacaagggtacagatgaagagatgtgtattgtaaggtatagggaggggtatggagcttccatttcctcccagggcatgccatccttcaggaacctctgcatgttcagctatctagaatcttcttaaaaattttaaacttttatattgataaaagatatatttaaatatatgttggcggctgcagggaaaaatatgcatttctttacttattaaaaggaaatgaacagcccagaaaatataaacttattggacatatcactgatccaaaatttggcaagcctttcttcacattatatattccaacacagattgttacttcacatttacttattcgccccccatctcacccttctccacaaaaaagcaagcaaacaacctgtgtaacttcacagttgtcaatggttccttgcaatacttcagctcaaaatcttttgtacctcacctacagctttgttgcagattttctttctgtagttgagaaacactaatgcattgtctatgacactaactttacttttgccctcatggacaagggagaatgtttgaaagagtttatgtgatatctccttaatagcattccttaccaaatcaagcaacaatgtaaatagaataaaacctttttataatgtatttcttgggatctattttagttaccattgtgctatctggaagcaatcatttggttgattcattagcatttaccaactatttattaattgcctaacattcttcagatatcatgttaggatgatgaagactgaaattaagacatgaccaatacaatctcccagttccactctaccagcactgtataaaataactttatgttatgatggaagtactctgtgtctgtgctggctaatacagtagccactagccacacgtggctattgaatgcttgatatttagctagtgtgactatggatctgaattgttaattgttaataacaggtttattggaatgtaattcatgtaccatataattcacccatttatagtgcacaattcagtgatttttagtgtattcagagttgtgcaaccatcagtcaattttggaacattttcattaccctgacaagaaacccagtattcattaacaatcactccccatcttcccccagcttccactgctttatgcagccactagtgtttttttctgtcttgatggatttgcctattttagacatttcttataaatagaatcacaatatttggcctttagtgactggctaatttcagtttatttaaatttaatgatcacatgcggctagtggctaatgtaagaagcaagtgaagtgaaagaccaaagacagatgcttaaggaatgctgaaggctcaggagaagaaaatcctgcagaaagggtatgtgtaaaacagagagctaggagatgaacttggacagagcctgaagataagagactttcatggaggagggaatggttaacagtaccaaataatacagagggttcaaaaagtatagttcagtgtgatagtaagtatcccgatgacagaggtcactagaatgtggtcttggtggggaagtgagggcaggtggcgctcttatgtcattatagaagaagggaacaaaggaacattcaagataccttgaaaggggtgttgggattgatcaaaattctcttcagttgttgttaatggtatttttatggagaactgagcctatatgtaggcagaagagaaggattcagtggaaatgaagaacttacagatgattaagcaagttctggaggatgcaggtggaggtgatcagcccaggagtaagtccagtcaaggaaaacagtcttttttcttaaagggaggaggaagtgaagaaaaagtaggtggagatacagcacagtttttatgtagaaaggatgaaaattcaaatagctaatttactttggggaagtaggaatgaggccttctgagggtaaaatttggttcctccaatttcactgtgatcatatgtggagaaagaagtgctaaaacatcctccaatgggctaggactgtgggtggttagagtgtccatcgctgtccacaggaacctgtcaccaaaaaaggacagacatttttaggtacataaagccacatgaggtccagagagatactgatgtgtccatttttgccactaaaattaaagagtgcccaaaagattacatttgagttcttgaaagaagcaatgtagctccatgaggtcactttccttccctctcccagttccctccctccctccctccctccctccctcccttccttccttccttccttctccttcctttgcttctcccttctttctatctatgcttcttacactttgtagaaacataatgctttttgccttataatgctttttgccctacagggaaaaaatgaaaataaaacaaaaaaattcttaattgttccaaaccataatgaatagagtattttattttgtacattataatggatttcctttatttttttgaatcactcttttttgtttttttgacaaatgttgtaacagtggaagagttaggaaatgcttagaaccatctaaatgaaaccaactatccaaatataaaagaaaaagggccaggcatggtggctcatgcctgtaatcccggcactttgggaggctgaggtaagcggatctcgagcccaggggtttaagacctgcctgggcaacatagtgagaccccatttctacaaaaagtacaaaattagctgggcatgatgccatgcacctgtagtcccagatacacaggaggctggggcaggaggattgcttaaacctgggaggtggagcagtaagctgagatcgtgccattgcattccatcctgggagcctgggtgacagagacagaccctgtcaccaaatacatacacacacacacactcatatatacatacatacatacatagacacatatgtgtgtgtgtgtgtatatatgtgtgtgtgtgtgtgtgtgtgtgtgtatatatatatagagagagagagagagagagagaaagagagagagagagagatctattctgtgatgatggaaatattccgtctgtgctggctaatacaatagccactagccacatgtggctattgactgtttgacatttagttagtgtgtatatatatattatatcttttgtggaagatatatatgtatacatatatgaaaaagatacaaattaatcgatattgaattaataacattgctttagaacaagctttctatatagatattttagaaattaaacttttgtggtcttgtcaacatataaataatatttacctgtgtatttatttcttttaggcttttaaaaccaaggatggctatattgtagttggagcaggaaataaccagcagtttgccaccgtctgcaaggtaatctataattattgggattggtcgatgattttgtacaaagccagggaaagttcagttttgcccaggtcacaaccaacttaggccccctgtgttagcaactaaaagtataggatattcatgcgcataaaggataaggcagagtccaaattagcattctgtgttttttgtggtatttggctgtattttaaagtgaagaatcgtagtagcttaaattgtcctaaaacttgacctgcctaccattccaaacaaaatgggggaatcatttttagagggacctttaacactggtatttttttctttttttcacctccctccttcccttcctgccttcctttcttcctttcgttctctccctccttctcttttactatatcaggttaattggaaccatatatagttaagctactcccatatttattttatttactactggaaattttaaaactttttttcaacttaacctttatttaatgagtacctttctgaagaatttatgtttcaaggttttaggaattaagattatattaaattgttccttctcaacaaggccttaaaataaagaccttggaatcatttaaaataatttattcttagggatattctaaacttgtagcatttactaaacttcgccatcttggatcactgcaacctctgcctccttgctccaagcgattctcctgcctcagcctccagaggagctgggatgacaggtgcgtgccaccatgcctggctatttttgtatttttagtagagatgtggtttcactatgctggccagggtggtctcgaactcctgacctcaagcgacctgcccaccttggcctcccaaagttctagaattacaggcgtgaaccactgcacccggcctactagactttttttttctttacttgatgtttatattagttatcaagactttggtgttttgttttaattttagaacttaggtatctgttcattttttctggttttaatccaagtaatagaatttcatttttatttttatttttcttaaatatatccaaaggccttacctgttaaggatttttttctttttttttttttgagagacaatcagcttttatactaaattttaccatgagctttcagtgttattaaagatgactatgagggccaggcgcagtggctcatgcctgcaatcccagcactttgagaggccgaggtgggcagattgcctgagctcaggagttctcgaccagcctgagcaacaaggtgaaaccctgtctctactaataaatacaaacaattagccaggtgtggcagccatgcgcctgtagtcccagctactcggctgaggcaggagaattgcttgaacccgggaggcggaggttgcagtgagccgagattgcgccactgcactcaagcctaggtgacagagggagactctgtctcaaaaaaaaaaagagatgcctatgaaatcctgaatctcatttactgtagttaacttattatgtacagaaattacttattactgtgcctcttttgtatgagaaggtagggagcagagctaaaaaccacagcaaagggttgggaaggaccagggagaagctgacaaatggagatagttctgattgcaggaagggctgaaacatctgaggtgggaaagaggggagccttttaaatggtgactctgagtaagtgtagggaaaatcgattcaaacatttgatctgggatcaaagaatctttattatgaacggtcaatgttaaaaatatgaaacatacggaagctgttgcctgtgaagtcatttgcgtactctaactgcagagatgtataagccagttcattgctataaacgagtacagattttcttcctgggccatatgttttggagttttctttctccagaaagtcgtggggttgggggtgggaggacctggcagtgaaaattactgtttgacatactctttagttttgaaaataactgtactgaattctttgtatttttgattcattactgccgatcaagttaacacttttgaacttcctcataaatatccataagaacagttttcaacaaaggttcttatttcaaagcagaatatttgccagaagttttagtactgaaatatgacttattgttatggtgtgttataagacattgcttataaaggagactatcagagggccttaggaatggcacacttgaccttgattttctcatatgagagttaggaatgataatccctgttatgagccattaatccaatgtctgtaaaactctttgagattctcagaagatttatgtgtacgggattcttgagttatttacattattagctaagcatcctgcgtgaatgctgcaatctgattgactttttcaaatctttgtaattatgccctcacatgtaaacttgtcctaaacaccttcttacctaagaaaaatcatctgttcctccattctgatgcaaggttttcttcccttcccagttatgtgtagcgtgtggatgtcttctaagcatttttttttactcatatttatttattactcagagccttgttattcaaactgggcttatagaagatggggttcccagttcttcacagtgagcccctcaaaactgttctttcgtcaagtacactccatcaggaaagatgggacaactttagttcctggtgagaaatgtggcagcactgtctgtgacaaatgaatggaattgacttatgcctagtctcttcccaaaatagaattgatatagtggttgattgataattcttggggaggagctatattagtgagctttcactgtaaggagttggagtgggagcaagaatattgggttcaagtctgaggttccagaaaatcttgttgtgtataaagtgaaccttgttcataacaagtcctacttaatgttccttaccatgatacagcaaagtatgaaagtgagcatatgtaagctattttaagctgatggatgccacccaaatgggtattcctatatgaaatattgaatattgacatccttttgaaagtaatgtagactgaaggcttcttttactggagagactatacattggttctcaatgtagtatgcataggaatgtcctttagccccattcccgaacattttactttagtatgtctggggtgaggtagaggaaacttcagttttaagaaggactgtaggtgattttggagcaagtttttagaccacctgctccaaaatataatatatccaaggtataatgtttaaggcctactgtaagtcttattggtaggtgaactctgtcacggtccttaatcttttctaagcatctgttttcctatgtataaaatgaagattataatacgtaattatacttgtatacaacttaggggtttggaaagtgttagagaagtgaagcacttagaataggccttgctcatgtgcacttaataaatgacatctatgaaaattagatatgaagattctggttctgaggaggagagagtaaatacacttttcccacttaccccgagcacggtgatcatacctggacagaattgcatgaatccatgaagcatgtattaaaagactttgaaaagtaaatagtaagagatttaggggagaacacctgaatttgaagtacctctaactggcagtcaacttaaccagcttttccctctagttattccttcacttgagtatagttgaacctgaaacctggaagtgagcaccaggcagtgcagcagatatccaggaaatgctctttattcccggtgcaaagaacatgaaaaagtgagctgtaatgtcagagagagtgtggaaatagtttgttttcccctcctttccattttcttatgccccagaccccaagtaatcctgtattggaaacagcagatgagcaggagccaactctgagaaagaagaactttcttcattgctgagctgtgatcccaaagaaaggagtgaatctcctttccttttccccctccattctcctgttgcatggcctctgccctggaaccatgctggggagtgggataactaaagcaggagccccaggcaactggaaaatgctagagagattgcagagagaagatcttgacaaagcaatccttgatgttgtttatgaactcttgggatcaccccttacttgcatatgcactaatttgatcctaatcagcataccaaagatgataggaactgaattagtaaatagacaactgcccaggttgtcatatgaccattaggtttggcacttactagtcagattcaaataacactgcaaaggctttgaaaccttaatcaaaatgagaatcaaagcccacagaaggtgggtaagaactggcagcctggatgtaaccaggtcaattgtctgctaaaccagcaagagtaaaaattctccttagaatttaaacaagacccagtggctcataatataatgttcaaaatgtccaggatacaatccattattactgagcatatgaagaaccagaacttgcatgagaacaggccatcaatgccaacgcgaagatgacacagatgttggaattaacttacaaagatgtttacatagctattataacaacgctctaacaagcatcacaaacactgtttaataaatgggatatagaaatatttagcaaagaaatataagatatgaagaagaaccaaaaggaaaattaaaaacttaaaagtataataaccaagaaaaaaattacacctcactcgttgagctcaatagtgcaatgaagatgacaaggaacttaaagatagatcaatagaaattattcaatctgaagaagagagagaacaaaagatagctccttcctactcaaaacaagaaataacagatcctcaggaacctattcaacaataacaaaaagtccaatatttatgtcattgtagtcccagaatgaggggagaaagtgtacatgctgaaaaatatttgaagaaataacaattgtatatataccaaatttggtaaaagttaaatgcccgtagatttagtaatttcagcaaaccataaatgggataaactgaaaaaaatctatgcatgaatacataatgtgtcctttaagaacaggtgtatgtcctgagaaatgtgtcagttggtggtggtgtgtgaatatcatagagtgtacttacacaaacctagatggtatagcctgctacacacataggctatatgggatagcctattcctcctaggctataaatctgtacagcatgtacatgttactgcactcaatactataggcaattgtaacacagtggatacacaaaaatcatccagaaaaacacccagagggggaaaaaaatgtattatccatggggaaacagtgatttgattaactgcatatttttttgtcagaaattaatgctagggaagaagtggcacaacatgtttaaaaggctgaatggaaagaatgccaacctagatttcaatatccagtagaaatatccttaagaaatgaaggttaaataaagatgttctgtataaaggaaaactaagggaatttgtagccagctgacttcctctaaaataatttttccaggaatttttcatttacagaaggtaaatgttgtcagaagggaactggaaacatcagaaatgaaggaaaagtaacgtaaatagtaaatatctgggtgaatataatggtctattcttttcctagtgaattctttgaaatatttgatgggtgaaagcaaacattaagatactgtctgatgggattttcagtgtatgtagatctaacatacagataaatacaacataaaatggggagagtaaagggactatattgtagtaagtttgctatattccacttgaagtggtaaaattttgattctaactacaatgcgaaaagtatatgcattatgattccctaagcagtcattaaacatctatcattaaacatctatgcaaaaatatagccaaaatcaaaataggtaagtgtaatagtaatgactctaaagaataccagaaagcaaaacagggataaacagaaaaaagaataaactgatctaagtcattcaaaaatatcaacaacattaaatgtgaatggtctaaatatatgaattaacagaagttgtcagaaaaaaatgacccaactctatgctgtccaattcatatttgaaattcacttcaaatataatgatactgttaagttaaagtaagaagatggaaaaatatacaaacacaaacaaaagaggcaaacactaatgaaaagaaaactggagtggggctatattaattatggaccagtttttgtcatctcagaaaacttgtttgcaacaaattcttgtgcaaatacttatttaacatttgtgctggcagagggaagatcagatgatctgaatttgttgagaaattgtgaaacctcacatttcacaagagatgttgccttttcctttatctaaaagctagattccagtagttcttatgctacaagtgattctctgtttctgcaccttcctgcatatgcaaagatcttttatttcagtactgagttatcatattttctatcatactggatgccattttaaatggcaattaaacttaacatgtgttgtgccagtaatgcacttaaagtgatggcggtgtatatgaacattatgacttacaggcaatgacaactcttcataattttctcctgacaaacagctctttcagaggccatatagcttttaagaagcaactatatttatattttatttatttatttatttttatttatgagatggagtcttgctctattgcccaggatggagtgtagtggcatgatctcggctcactgcaacctctgcctcctgggttcaagtgattcttgtgcctcagcctcctgagtagctgggattacaggcacccaccgtcatgcctgaataatttttgtatttttagtagagatggggtttcaccatgttggccaggttggtctccaactcttgacctcaggtgatccacccgccttggcctcccaaaagtgctgggattataggcatgagccaccgcccctggctgcaactaaaaagtgattttagacataattgaataaggtatatgcatagaataatgtctgcaatatcatacacctgaaattgttcatattgtttgtctgtgagcttgtcagttgaagaatgtgttgtcagcatttgggctataccagtgaacaaaacatttaaaatactttgactttgtgaagcttatattttagcagggcagacagatatggagtaataaacataataaatatgttaggtgataaatattatgggaaaaagtggtcaagggaagagggaatcaggggagtcagtgttgagtggggtggggtggcctgtgatgggggtagggtaatcaaggtagttgcattaagaagttgaatttgagcctactcaaccaaggaaaggaggagctagccaactagatgtctggtggaagatgttccaagcaaaggaatagctattttaaaactactgaggctgaagtggaatagacatgtttctggtccagcaagaagatgaaatggctgcagcaatgagcaagggaggagagcatggtaacaggtgatgttagagaggtaatagcgccatattgtgtagaaccttccagactatcttaaggattttggtttttgctttaaggggaacattagatgataggcatgttaaaacacttgcagtttttattatcatgggtcttcattattttttctcttctcctttcgtttgctactcagtttatggtgttttgttattttcttttttttttgtttttgccaatgtctcttcatttttttgcagagccctccctcctttcttttttgtaccaatatatgctttttaaatttttctggccagactctgtggctcatgcctgtaatccaagcactttgggaggccgaagtgggcagatcatttgaggtcaggagttcgagacaagcctgaccaacatggtaaaacctcatctctactaaaaatacagaaaaattagccgggcatgatggtgcgcatgcctgtaatcgcagctactcaggaggctgaggcaggagaatcccttgaacccgggaggtggaggttgcagtgagctgagatcgtgcccctgcactccagcctacgcagcagtgtgagactgtctcaaaaaaaaaaatatcttttgggggaaacagtacctagttggaatatttcacatttatttagtgcttaatatgtcaagcattttcatgtacattgttttattttatcccaggcagcactcttttttaatttaagctccaaaataatagttatgatcacagtcattgaagttgtctctcgaaacattttgaatgttagctggcatagctgaagatggaaggatcattactttggccaacgatttcacaccatctttgaaacaaaaaagagttccagtaagtcaaatacagaggacacatgggcattccagttacccttaagtgtggtcactgtgtaattttttgttgctgatggtgctttttgggtgaggccaggtttataaatttaacctgtgacttagtgaagacgcttggttttttcttggaatgacttattcactcttacggagggagggtgtctaactgctagacagggcttgaggccaattcttggatcaggtgttgtgacagggaggtttctagaaagggtgctgtatgtggtgttggtttttaaaatccgggagaataatgcagtctttattattcctaaaggaaataagtgaaacatgtgaaagaaaaattacaccactgagatggtctctttactcaagggaatcttcttcacttctctgtcctttgtaagatgattaatagatagattttatttaaactgtggcaaataaatgaaaccattaaatatttatattgaaagtaaatatattaataaaggcaatgaagctttctgtaggccgcatggcctgcccccaggctgtaaatactccttgtgactttccaatacaactgccaagcactgcctctacacagtctttgtaaaacttttccattccaaatccacttggtactttcattatggtcttgttaacgttgaatgttgtccaaagggacttgcaagatagattttccccttattgaggaggagcaaaagaggaaatctataaaagcatttctagttggtattacttcagggagatatattcataaaaaatagtgatacttctataggaagaagatcttttaatttgctattgtttaaatggtgagaatttgggtaaatgtatttgcttttactttattttagcagcttttagaacattctgcataggacaacctgggaagatcacagtattttatttacatatggtataaataagtgaatatatctacaaggtacatgttgactgtatacaagatacatgtagatatgcacttaggatattggtttttaaaatttggtccgttttacccagtttagcatctctctccctatttcctctaaacaagatttttttctgtggggatctgctaacatgtttcctatattctcatatttggtataagacttatgggcatcttttgctggtctcctatatgtaagaatatttgcttaaatgtagtaaaagcctcttatgaatgacaaaccctttcaccagcatgttccatcctaatcgtgtgcttgttccctccatatgtccttgttgaggggcataaagaccagcaaggaatgttcttgagaagggagagataggacctgaacactagcacccacaggcaggtacaagaactacctatttcttatactggaaaattatttttttcttttagatcttggatttgcctgagttgattgataattccaagtataaaactaaccaccttcgggtacacaatagaaaagagcttattaaaatattatctgaacggtaagtttggatgttgtattcatccatttaagaattaatatgtgataagcatttatctggtgttttatatgtttttttcttggcttatttgagatcaatttgtaattctcttccattttacaaaactggctggtggagagattttaaagctgtggggtttttttgtttgtttgtttagaagcacttgaacacattttatgttttgttaagtactgagtcataacaatgatataaataagaaagtcaccatgacttgaatttggttgtttctctgtgtcctgtacctgtttgggtttagtttatcataaatacaacaacaacaacaataataatttaacattatttcatactttcactttgttaaatgctttagatacattgtctcgtttaatcctcataattatcctgtgaggtaagttctgttatttccattttacatgtaaggaaagcaaggtaaagagaggtgaaatcaagagttggtttgcatttctgagccactcctgtgaatcttgatgttatttctggatcattgcagatgccacattgagttatgggtcataaaatattaatgttaattaagtagaatattttatttccatttttttccattaatgtcaggttatttttttgtaatacctgtaccaatttttcaagtttgtctgaagaaaataattattcttactgtttcatgtcagtttcactttttgtttgcctttacatgtcttctgaatctgtacaaatgggctttgtggcttttgtggatctaaatgcccacatgaacttttcttttatattgaaaatttgctctcatcatgccaataaattaggtaattttgtttaaataccatatttagccttttgaaaaggctcaagtgtttctatgtagtatacatcaaagttataagaactaaaattccgctgtttttatttttgttgtctttgtatttggggatgtctgcaggaatatctgaatcaacattcatctatctatttttcctggatttgaaatacttttgtaactttaaacattttataattttaaacactgcctgtatcttttccatgtgccaaatgctattcatatcaatagggactgtgtgttgtgggactgatagacacagaatgggggatggagaactgggtgcccttttctggtccctagttaaatataactctgattctaccgcgaagccccagagccctcaatgattaacttttctccacatgagaagtgcccatttatttcttctttttgcctctctgcctctcaagcatttgtaattcatataattaattgataaagctttttcctttcacacgatggttaccaagtttcaataatagccacttgtgagaaccttatcagaagctctttgataaactgaataaatcatgaccatactgcgagaagaacagatcccaagaaaaatatgatacctagattggtttcctgtgttttaaaacttttattccttgctaaattatgttatagagttcaactgtgggatgacttttagtagcatctgtaacatactcattgccattttccctctttggggtgaattatataatctgcaaccttcttctttctgttcttttatacacagaagtagaagtttcagcattttggtatctataagtttgttatatttttattcagacttaacaataagtaaggaatcgacctgcaaggaagagacggggcaggcgtgggtagtcctaggagaggaaatttcataaggaggtcacatcatcattggtactgccgttaaaacacagaccacagatagagcccttggctgcttgcaggctagcttttgtgctctcttctgctagtgcgctgacattttttggtaccttcttatgagttgcagttctccaagtctcttctagcacgtctctcttcctccacggtagttcaaatagtgatgacctgggaagattagaattagaatattgattcattccagtttataagcttatcatttatttttctgaacaaatatcactggaatcattagtactgcttagtgcttggctttgagaagtctcttaaaatttctcattttcattatatgatgtgtgtttttccagtattcaaaaatattagtggtgcttcataagttacatgattagacgtagcctccagcctggcatgcggtgtcttccataatctgacatcacctttcctgtccactcttcttcttacatgtttccaaaggacggccctgctatagtcaccctcccaattggtttagtttcctctctgaaatgcttctcagaattaccactattctgaaacttagtcatgcttcaaggccagttctagaagcctctgttcccagtaagatgttggcacctttaggaaagaacattgtccttttcatgccttgtccgttgccattgccaaacagaagtacaatcaacgttagttgtcattatgaatgatactgctctagggccttctcaacattctcgtcttgctcagcacatgcattacacagccacctcagaacttgcaggcattttatttcctaacaaaagtgttacattagctcatagccacaaaaaaggagccagggagaaaggaaggagtggaaccagcctttggtggctgccaagtacatgccagataagtgttattattcccacttgatatgaaaattctgacatttagggaggtggtctccaggtcaggcacatagtgaatagttagaaatgggattcaaaaggctacacctttttcatctctcatattgcctccctgaagtggcacatgaaatatgactgtgtccttgtttgtttatgcgctcaagaaatatttattgagcactaactgtgtagtaggcactgttgcaagttggggatagagaagtgaacgaaacagacaaagtgtatccatgaaaaataatacaggccaggacaaggaagaatgccagaagttaagtgtgaagctgggtttttcatttagtctggtcacagagggcttctctgtgaaagtgacatttgatcagaagcttgcaagaaatgagagaaaatgtctgagggaggctggcaggcatctgggagatgaattccaggcagagtttatggagtaagtcagaggacagtgtgcttggatctgagggagcaagagaagaggggtgtcaggttggttcagagagagtgggagcccatggcaggcagatcaagtcgtgaactcatgaaagcctttatgacaaagtagtttcttaaacttgtgaaataaaggattttttttttctggccataaaatggatttgcttattgcaacttttttctaacttgaagagagagcgtcaagggagggagtgctctacctagtagagaagaggtcaaagcatttcagcaacgtggagtcaggaagaccccgtttctcacctaggaagaccagagggccaggttgaagtggtctatgcttctccatttattcagtctctcacatattcaacaagcatttgttgaacacctactatgtgccatgaactgttctgagcactagggatatagcagtaaaatacagtcaagaattcctgccctcctgaattttcatttggtaaccattgcagactttctagaagacatacttctttttggtagtggttgtttttgaactattacttaacacatttgtttcggtgagcctaagaagttagttttccatatttttcataataaccacttaaaaaattttttctcttgcaaaactattacagttataggctgtacctgttactcatttattgtactttttcaacatgttgatatacatgctccagtttttaaaatgtggtttgccagccatttccatagtaaaaacatatttttagtaacagtagccactcacaaataatcgactttaccatgtgagtctatcgtgtttttgcctgttgtcttctgttaaaccttacatcgcaggcactttcctttaatacttatagacactttccttgcctgatatttttattttagaaaatctttaaaacgtgaaaatgtggagggattcatgagagtgaatttgcacagcagataactttaaaaacaaactctaggaatgatgaactcactgtgtttattttaaaaagttttctcatcctttacacccaattcgaagacagtgaaaacagaagcatttatggatttttacaaagttggctcttgtaaatatacacgtgaatttcctattgtgtttcaaaatcttccttccaaagtattttccttgagcaatttttgagtactcccctccctgtcccttgtaagccttcatttatattttttagaatcaggtgattctcctatgaaaagtccaggcttttttggaagtacctaccagagttgtcagtcacttacctcagttctctgttattcttgctaagtacagtttgaagctactctctgagggcgatcagcctcactcaggacggcagctgcctgttttggtcatcagctgcgttttccacagccagcacacacgattcccctcaaatgctctcaagtgttactattccccaaccagggctgtgagcaagtcttttttattaatctaaaggtagaagactttcccctggagtttgccattttatccagggtgttgcagaaagtatgtttacccagctgctaacattgaaaactaggtaaaactcaatcatgttaaaaatccctagctaaaacagaagaggagatataatggagactaatccagcgccagataaaacaatccccttctttgcaatgctaaggagcaacaaactcttaaacctgtgctactcacacaccagatcagcatttttgcaatagttaggaccccaagagagatattgcaagttgtgaattgaaactaggaagagagggataaagatgatgtattagtgtttggggagaaataataggaaaacatgaaatgaggatgaaggagaagagaattgatggagaaaatagacataaaatttattttattctctctctcttcctctcttcaccaacatttattggccattgactgtgtaccattgtcctgcagatacagagctgaaagatgaagcctgggcttttaaggagctcatggtctaattaggaaaataaacacagaaagcattgatttaagtagagtgtgggaattacctgggtaatcatatgcacagtggattggggagcccagagaaggagcaactcctttaatctgggaaatcagggaaggcttcctggagatggtgccatctaagataaatcttgagggacaaacagaattaggcaggtaaagaaaaaagttcaaagaaggaaatattgatgtgaatgtacttttgtagcatgaaaataaaatcatgacagcagaaaaaaagtacagatggtccccaacttacaattttttaaatttaccatgtggtaaagtggtacacattcattagaaactgtactgtgagcctggacaacatagcaagaccctatgttgctacaaaaattaaaattaaaaatttaactggccctgctggcatgtgcctgtagtcccagctactttgggaaagaaaccatcctgtgaatttggatctttttccagggtagccatatatgcagcaaaatactctgttgcgatgttgtgcagcagtagtgagctgcagctctcagtcagtttggtaggttaggtatattaaatgcattgttgacttatgatgtttacaatttaatgatagttttattgggacataataccttcataagttaaggattatctatagtttggagagatgcagttgacaattttcaagctgcttttggaaaaatgttacatatgtaaagcaagtatatgtcaatgtagtcctagtgaaggcatttgtaaaaagttgtttacgttatgtcatcataaataaaactaacagcattagataagttcgccttttaaaatactgtggcaattcctttagtaaaataaatagttttggtttggaatgatttggttatttcttaaattaagtttttgatttttaattgtctatttacttattttcagagtttactgcattgtggagttaaatgtcctatatcagggccttttaacagaggtgccaaacaagtatttgttgaaatgaatcaagcatttaggctgggtgcggtggctggctgggtacagtggttcacgcctgtaatcctagcgctctgggaggctgaggcaggcagatcacctgaggtcaggagttcgagaccagcctggccaacatggtgaaaccctgtctctactaaaaatacaaaaattagctgggtgtggtggcacacgcctgtaatcccagctactcgagaagccgaggaaggagaattgcttgaacccgggaggcggaggttgcagtgagccgagatcatgccaccacactccagcctaggtgacagagcaagactctgtctcaaaaagaaaaaaaaaagtttattagttacattcctctaagttgatcatttttaaaatttgatatcaaattattttgaatagatttatacaaaatactggagaattggacctggaacatttcttggctcttgatggagcaattgtaacttcaaaggtccctatactgaatgtcaatgtaaaaaactgacatcttggcactattaagccactatgaccatttcactgccctggctaggtctttctggggctctcttcacctttcaaaaaaaataaataaatatattttttttgagacaaggtctcactctgtcacccaggctagcgtgcggtagtgtgatcatggttcactttagccttgaattcctaggctcacgtaatcctcctgcttcagtctcccaagtagctaaaactacagatgcaagccaccatgcctgcttaatttaaaatataattttttttaaaaagatagttggtgggtgggggagtggggtttccctatgttgctttggctgttcttgaactcctggcctcagataatcctcctgctccaacctcccgaaatgctgggattatagctctgagtcactatgcctggcttctatagcttgaaggataaagttcaaaccattttacctgaacacatgcacctcccaccttgtcagccttgcctgggtcacacagaacccagtgctactacttttaatgtggcctaatctttcagtcctccatgtttccccatatactcattacttgacactcaaatgatggagcttcttaatctcactacctgctatcagtcctttaaaataagcacaagttttaggagcttttctggcctcgctagtctgttccaaggggcccctcctgtgccgctgcatcacagcatctaccccactcaactttcatcagtcatttacttctcttcctccttgacaagacagtgaatttcttatggcagagaatatatcctttggatttttatttctagcacctatttggcactcagtaaatgttctctcagtcagtgaacatgtgaagcaatgatgggcaaggtatccaagtgtggcagaactgaccaaagggaaaaagcaaggatccacgatgtcaggttctacaaaacagaaaagagcagtggtagctggaagtgaggactttgaatgaactagagaacctgtatcgtggtcatacaatataagaagatctgaatttgagatcctagtctttcagtgatcagccttgagcttcaggttctcatatatcatacgtgtaaaaatacctacatcacaaagaggattaaaaaccagaacagacgggccgggcacggtggcttacgcctgtaatcccagcactttgggagactgaggcaggtggatcatgaggtcaggagatcgagaccatgctggctaacatggtgaaaccccacctctactaaaatacaaaaaactagctgggcatggtggtgcacgcctgtagtcccaacaacttgggagactgaggcaggggaattgcttgaacctgggaggcggaggttgcagtgagccaagatcgtgccactgcactccagcctagcgacagagcaagactctaagaaaaagaaaaaaaaaaaaaaaaaaaaaagcatgaaaacagccagcacagtttgagcatgcagcagtactcagcctatttgaggaaaatcttttttaaaaaagttttaatttttggagtacctagtgtacgtctataaatttatgggtagcatgagatattttgatacaggcatgcaatgtgtaataatcacatcattataatgggggtatccatcagcccacacatttatcctttgtgtctcaacaatctagttatactcttttagttatttaaaaatgtacagtgaaattatattttactgtagctactctgttgtgctagcaaatactaggtcttattcattctttctatttttgagacctatctgaggaagatcttaatcctggaaaatcataaactttacttccccaattgtttgctttagcaatttctatattagttttaaattcatgaacctcatttccaagatttttttttctgccaaactgtaattcttataagactcaactttcacaatttgtgtttacaaagttatttttaactgccaatcagacatcctaataaggatgacgtaactagtattatagtagtaatttacttctaccaaaagcaaagcatgacattttcattagcctgcatggcctttttgtaggtggataaataatttgttcaactttttgaaaaaataaaaatagctcataggacttaggaatacattttactttgtactaatttcctaattaagactattaatagtactcattttctttttttttttttttttaactaaaagagtaccttaatagcccctattctattccctttcaagagacacttgttctgcgttgtgggtaatgaacttggaatttgtgaacactccacttgagttatttcttgcacttgtgtctgtactttcataaagaatgaaacactttttgcgtgttccttaattgctaccctgtgttaatagcctccacgaaaagcttcagcccatatctttaagcactttagtaaaatacacccatgacttctcctgtgccatttttatgtgtacgtttttcactgttttatttggtatctctagccttcctgaaaactgtttgacttttcagttaagtaatatctgtaatttccttattttttattttctcatgtttaatttctaacatctgtgtcaccttccttggcctttccccctttcctaaatcctcaattttattcctccctccttccttttttggcctaccccatctttctgcccctactctgcttttcacactttgaactgttttaaaattaaacaataaatgggtattatgtagtacagtcttaattggatttcacttatttgcatgaaggctttattgagcacaagttttcttagagaacagggaggatttttatcagtggttacctatgtaatacagtttagaaggcatggaaggaaactttattccatgaaagataattcttccttacacatagtttgctgatttcagaggttttaccattaaagattttgtgggggagtgggggtgggttaaaagtctgtatactcttaagtttcaaacagcgcagggagggttaaagcttgaactctgattccttagtgtaaatacattttcccagatctttgcctcagtttagattttaatgtggagaaaacagaggaatcttccaaacactggctgcctaaggtaagtgaagagggacaaaatgagaagctgagagcagttaggagccccagagatgaagatccccttcctgacacatttgccaagggctgagaggttatggaagtgtcttttaaatccgatgaattccacctttccctcaacctggcaaccatccactctcccatatctacatgtttttaatatacatagagaaacttattgttttcaccctctgaaactttttgagttggtttaatattcttttttccatatgatcacattttaaaatctcttctgccaacttttttttctgacttctattaatgtcttatgaggctgcatttcataagctttatatgtatcctcaacctacatatttagtttattgtaacctcctcccaacccctcataattctttgaatcatatcatggcattcactgtagaggggctaatttggataaatggatctgatgtttggtgagggtcacatttgttttcttatgcattccttggcagtgctgccattatcagctaatagatggtcccttgtaaaatgtctatattttatgtggtacattttctgaatgttggttatttggagatagatttaagtggctgtgttttgttactataaaatcagcccggagggtaaaagaaagaaagaaacacagctctggaaagcatccctttggcttagagaatgcaaagggaaccactgcaactccaggcaatctcctcgtgaccagggctttttccaccctgttaggagaattctttgtgactgagaatcaaatgatgtctaaagacttaaaagtgagtcagtatggaatggaatgtcatctcagtttttttttttccaagagggctataaaccattccacactaccttttaggaggaagaattaggtggtggttgtgggatatttatatgtttgtatacggaggggatgatggtgatgggagggagtccagtaaactctatttccctggataaaacatttaataccctcgtttctcctttggaacttaatgtgtatttttagatttatagaatgttagagtcctaaacacttggggagctggatagaagtttggatatcatcaaatttaaccccttcctaaatgtgagaacttagaattaatagtatcacgggccaaagatcccttgaaacgtggtggaagactccacaagtcaatgctaaaggccttcttttttgggagggggaaggtacagctctccagacttttctggctgaccttatttcgctcttgactttggaaatggatggagaatctggagtttgactcagtcaaatctggtttgctcctcggactccctgactcatccctgtcctgcccaatttcctgcttgcctttgggtcagactgagttctgctctgtactttgcccacttgggttctattcttatctcctcttagctttggctctccagcatggactttgcttgagtctttgatcttgcatcaactgatgtttctagtaagggccgacaccacctctctcccagtgctgacagatgacatccctgctgagtcccgatttccaccagctgtttagcgttctggatcattccctgttgaccagctgcttctggccatcctcacctggacaatctgcagtagttttggcatgttgctcactgcttccattggctgacggtacctaccttagttctagtttgtcatgttttccccagttcacacagctcattgatgaggctcagattgctatcttctgattatcaatgtcttttccatagcactcacggaataattgcttattctccttttctctaactacacattttatgtttacaatattcctggctaggaaaagaaactaagtgaacagtctctctctctctctctctctctctctctctctgtctttctctctctgtcacacatacacagaatcatatgtacacaacttaaatctctaaatttataaatttacattttcctttttaaatgatttttctttcctctattgtgaattgtttttcttttctcatttgctaactttggaaagagaaaaaatccagacattggaatgtctgagtttatttaagtctcagtactctgttcaatttaatgaacggaaacaaaaaaggaacatcaaaatgctggcctggatctttgtggctccaggattggccctttttggtggccattgatagataatgtatttgaaaaataggagtaattgttggtttcaacttactttttaaacacatcaaaatatacaaatatattctaaaacacagaaatttggaattatgagaaagtgagagaaattgtgaaaaacataattgtatataatttaacattctgttatctaaaatagaggataaaatgggtctctgaatgcacactaacaagcacaggttgtttacttaaatggttacatttcttagactaaaaaaagtactaaaatactaaatataaaattaaaataataatatttaaaataaaaattttaaactgtatataagttatagagttaagcatctgaccaaatatgaaatcaatgtacttgcctatataattcaaaatgtaatgaagaagagattatatgcatggttaacagcagcaatgaaatacaacatatctagggataacagtaacaagatgtgtatggggcttacatacaaaaaacctatacaactttcttggctaggaagactaaatattatagtgaagatgtaaaattttctcatattaactttcacaaaattcaaaacaccatttcaagaggattatcttcagaatttaacaaattctaaagtttatcttcaagtatacatgaaattgttttttaagtactggagataacaatccctgctatatggtagaacaattctaatgttaaagcaacataaataaattgaaaatataaggtgggaaatatatttccaagaataactgcagataatagtagttattttacaaagagactattaaaataggtcagtaaaaaattataacaacctcaatgtattaacttgaaatacttcacaaaaactgaaaacgtaaggtcaaattcatgtatgaaaagtattgtcttactagaaattaaatataaccaaataaaatggctgaaacatgtttttctctttttaatcattcacatgcttataaaaatgaataataattagtgttgcgtaagacatagtaagacatacaggttcattccctgctgtgcaaaaagcaattgttcaataggcatatagagccttaaagtgtcattcttagtgactcgataattctattttgaaatattcattcttggagtcctacgtaaatgtctttagaggaatcaagataaagacaatgataagtacacaattgcagagttgttcacaatcatgaaatagtgcaaagcacatacacatctggcattagagaaacaaataaaagcttactttggaatattctgtattcactaaaaattaaatttgccacagatcttttttactgcatgggaaatgcttattacatcagactaatttaaaggcataattataaactatgctagcaacggcataaaggaatagcaccaaagaaggaagtaaagctaatattaaccgtggttgtctctccatagaattataggtaattgtttcacatctttatatttcccactgttttccacgttttttaatgtgaacatctcagtaatcaatgaattgatgaagctaacaaatagctttggaatatacatccatttttaagagagcaaaccacataatgccaataataataataataataataaaaacttcagggatctgacatagctgatgagcactatcagcagttttatttgtagccttttgtcgttgagagcccataatggcacagaacatggaggtcaaaatataggtaagaagtgccttctgttattgatttatggaaatgccttctgttattaattcatgttcttgactttcactttgcgtgaatatcaatgccacatgtatctgagtattttctagctttatgttactcaggagaaatggctaaattcttataataatgtgttatacaattgacttcttttcagttgtagttttcttccttacaaatgcattgagaaagttgtatatttttctttctttgatttttctatgggaaggaaagtataaactcagtaagagggaaaagaaccatgtttcttgtttgtgtattacaaaatgtttcatttttcagtgggagagtgaatgttctgatgaaacacagtccaccaatgacttctgccataagtagccgaatccactaacaatttatgcatgctgtttgtggttgtttactgtattgttcaataaatcttacatacttattttaacagtaatcatatgaagcatcttaaagcaacatgcacatgcaaaagctgtacatttgagaaatgtcaatcattttctgatagttggttacgtcatttttactaaatatatcactttatcccaatagcaatagtagttggatgtgatatttgattgaaatattatttttcagtgcattaaagttaaaagttaagattgcatttagtatactctcttaagtagcctttatttttcccactccatgtttctaagcctaaggtgtttctgagtctgaaatgttccttctatcggttagcagcagggactgagtttttgatagtacttttgaccccctcccaaaagtcctctgaaagttagaagagtgtggctgtgatccacaaatgcactaggaggagcagaaaaaaaaaatggtggcatgatttaaccagggacaagtaattgttttctaatttgccagctcagtttgagttacatgtttgaatgcaaataacccccttggggcatatccaaaaagaaattaatttaggaactcactcagagatattattgcaaatggtctagttttataatttggtgcatggagtccaagggtggccaatcaggtaagtaagagtccttgggtggctgacagggtgggtaaaaacctaacttttacttgagttatagtgattaaatgtaaaatttctgtctcatatttctcccccattcttttaccatttccccttctctctctctctctcagctactattatgtttggtaggccacctggaggaaaatcatgcccgcttctccccctttccctatgtcaagctgtagtttagctggtaacataaaacaatcaaggaatgtttaattaatgtcagggatacccatgttatgctgaaaaatataaattatttaaagtagtttacttaattactaaatgacacagttaatagaagatttgagaagattcagaaacagcatagagtagtatgttagggtttgcctagaagcaaaacgaatctggggtcttgggtaccattaattttttagggagaggattccaagaaatggtattgagtgtggggggcagaggggcagggaagtgaggcagataaacagtttgccattttgggtagctggggctcagtcatgttgggaacagtctaaaaactgtgtgtacatactttggaatcatgtaaccagagggtgtggatgttagggcatttatcccccaactactatcctccagtgtttgatggtttcccctggaggtgccatccagcacactcgcatagttttgggaaaagccacatgcaaagaagaggtgcaggcgtttggaaaggaaagctgtcagcagcatggaactgtttatacttccagtaaacaatagacaacccagaccagctcaggttggtcaggggatgtgggatggggcatctgtagcctctacagctctgagtgtcagaagacaagaaaggctaaatgcaatcatggtagcattgaagcttgaatcaaactgctcagctttcaatacttgccctgtcctattaagacattagttatgtgacttctgtgtttcagaattttttcatctataaattggggataatgagcttataatagtaattcctacctttaaaattgtcgagagaattaaatgtgtgaatacagtagagggcctggcacatggcaagcacttgataagtactgcatattgtaggggtctgccagggcagcagcatagtgtgatggtagttaacttgtcttgagtaacagagttcacttaatgaagtctaagttttcactctttttggaagctatgtgccacgttgacttgcattgggtgcccattactaaatcaccttttaaacaaaaccttagcagttcctaaaccgtatttctcctgtgccttcatggtaaagtacattttttattcactctgtttaaaataaaatcatccttgtttaaaccaacatgattgctgtctctgctagcttcttgtttttcacgaatctgaccaacatgacatcatccaagtccttgtttgggttcagcaatagacaccatcctcactacctgaggttgaaactgaaagctctggttgtattatttgactgccttcaaattcacacatttgtgtcattatgcaaactgcatttctccgtcttgttcacgaagatattttgaatgaccttgttagtaacttcggtgaaatccaggaatactttgtccatagtatatccctcatatacctgtttaaaaccaagcaaaatagaaaatgagattggcttggcattatttgctttaaggaaaccatattggtgactaattcttactatttccttttctaaacttcaaaagagtactttacaatctttcattcaatgagtatgtattgagcttgaactctgtgaagcatcatttcgaatcccaggatttttccaagaattaacatcaaatttacaaaatccagtttccacatctttaaaacgaggcaatatgaggcatattacaggattgttactatgattcagtaagaaatatgtgaaagcacctaacagtgtcagagcagagaggtgctcactactaagtcagtttcctttcccatgttcagagagagtgaacccaaataattgatctataaataagtctatcaaattatctatcaatccatcaattgattgtttcattcatccatccatcctaaaattcatccaccctttattgctcacctcctcttttactgaggtggtatagcaggggggtgggatggggtggtaagagcatggattctggggctcgtactgtctcagttctaatcctggctcttgctaactctgtcatgttggtaaatcatttaaatgtctctatgcttcaggcccctcatatgtaaaatggggatgatagtagtacttatgttataggaattaaatgtctatgtctatgtatatgtctgtgtctatgtctatgtaaagtacttaaaacagtgccttacacatagtatatgctataacaatatcagctgtcaaatgtcaggctctgtgtcaaggctatgtggaacagggaacaagtgaggctgtttcctgccccacagtgcttacagttagtggagcaccacatactctctattaagccatgagactgctttaattatctgccattttttttaaaagatttggaaaccgttgaggaaaaaaaatatgatgatgagggaaaaaatttcttcacaaattgtttttggagttctcttaatttatatgcatagttagatgtaatcatatgcacataacaattgtgagttctttttttgcgtttgcttaacgttctttgtgtatatggtatcaagtattttgtgtacattggttgtattttttacttcaattggctcatatactaccctgttgtataaatatttcatagtatactaagggattttgattttttttggcatttagggcatttaaaatttttattgttattagaattttattgtcatgagaatattattatattgaatattactgtacaaatggaatgattcaatcaaactgaatgaaaagatttatagttctcattctttttttttttttgagacagtctcactctgttgccaaggctggagtgcaatggcacaatcttgcctactgcaacctctgcctctcaggttcaagtgattctcctgcctcagcctcctcagtagtccctgtacttggagtcctcctgggacaggtgtgagccactgcgcccagccaaatgtcggcttttaatatcacaaacaacatttaaactagtttttgcaaatgagagcactcatcttagctttaatgtgtttattcttcaattaatatagagaaacagtatttgagataaattacttccatgtttctcataataatgctatatgtataggaaagataacatcctcaaggccaattttattggattttattatcatattatacattcatatttataaaatatttgaattatttgagtgatagttctgtaaatagagatatcatctttaggagtcatttaaaggaaatgaataatttaaaggaaacaagactagtctgggtggagttagggagggtggacagagagcagcaagactggggagttggagtcttatttagagatttccaaaagtgacttctttctgaatgtagtagtatttcctggaagagcacttcctgtactgtatacatgcaaaagcgggttggattacctctcttcagggttccttgggtggaatgacattgtcggcaaaatttattctacctttggaatcttttggaataaaaaataacattttctatcctatgcctcttttctgtataccattttcatgttggtgtattatgtacagtaagaaaataatgttcccattcctaagactaatttatgcatggaaggcagcaaatgagaaaatgggtaaatgtaaaatagtaaatttttatgcttcacttgaaaatttctttattttaataagtttaaattaaattcagtggggacatattaaaaatagggtttcaaaacagaaaaatcaaagagaagttgtaggcttgtatattctggcgtgttgctttccattaccatatacttgaatttaggttatgtttgatatgttgcttagagtctgaatgtgcagttgaagtgactttagcttgattattaatctttccagtatgtcaatagagaacaaatagattttagggcaagaagtctgacaacagcatccccaacaaattattgtttgggcttttttttcccccacctttaggagagaggttcttgctgtgttgcccaggctggagggcagaggtgcagtcatagctcactgcagcctcaaactcttgggctcaagggatcctcctgcctaagcctcctgagtcattggtactacaggcattacaggcatacgccaccatgcctggctaattttttaaatttttttttccagagacagggtcttgctttgttgcctagctttgtcttgaactcctggcctcaagtgatcttccctcctcagcctcccaaagcactggaattatgggcatgagccaccatgtctggcctcctaatttctatctagtacttactacctgtgccaggcacaaaaataaggctttaatttacatcacatatattttatttaaacttcacgaaacttgcgcgaggtaggaatcatcattatgtgcttttattgatgatgaaactaaggcttaaagacttaagatactgtaaggtcatgatggagacaaatcctggctcgcctatttaaagatgtattgctgggttttttaaaggtgtatttaacaaataaatattgtatatatttaaggggtgcagtgttgtgatttgatatacatatgcattttgaagtaatcaccacaatcaagctaatatacacatttttcactgcagcaggttagcactgtttttgtgtgtgtagttaactgaagatctaaccttttggcaaatttcaagtacagaataaagtatcgttaactgcagtcacgttgtttactatatctccagaacgtatttgtcctcataacagaaactttgtaccccttgagcaagatatccctctcccataatcaaatctaatattaatctaatccatgttaatataccatataatgtcaaatcaaatcgattcgatatatatatggaattccacatatatatgaggtcatatagtatttgtctttctgtgtctgacttatttaactttatatattgtcctctgggttcatctgtgtttcagcaaatgacagaatttctttattttttatgactgaatgatagtccactgtgtgtgtgtatgtgtacctatatatatacacacacatatatatgtttgtgcaccttattttctttatccatttatccactgatggacacttgcttaggttgttttcttatcttggattttgttaagcatgctgaaatgaacatgagagtgaagatatctctttgagataccggttcatatcttttgggtatataatcatgtaccacataacagtgtttcaatcaatgacagtctgaatgtagcatagcggtcccataagattataataatgaatttttgttgttccttttctttgtttagatatgtttagacacaatattcatacaataacatgctgtacaggtttgtagcctagcagcaatagactatagcttatagcctaggtgtgtggtaggctgttccatctaggtttgtgtaagtacactccatgtacgtgttcttatatgatgaattacttagcaatgcatttctgtattaagtgatgtatgactgtatacctagaagtgagatggctgaattacaaagtagttctatttctaatgtttgagagcttccctgtttgtcaaaatggctgtaccaatttacattcccaccaacagtgagaagagttcccttttctctatgtccctgccacacttgttatttttttctgatagcagtcattataacagatttgaggtgatatctccctgtgactatgattaatatttccctgacatagcgaagttgagcacctttttatatatctgttggtcatttgtacgtcttcttttatgaaatgcctatttaagtcctttgcttgtttttacattgggttatttatttatatttgctatggagatgtattagttccttatatattttggaagattatcccttaaatatatggtttgtaaatattttctctcattctgtacatcatctcttcactcaattgattattttctttgctgtacagagactttttagtttgatataatctcatttgtctatttttgcttttgttgctagtgcttttatggccataatctaaaaaattgtttctcaggccaatattaggaaactttccccccatctttttctattagttatatcgttttatgtcttatgttttagtctttaatccattgtgagttgatttttgtgtacggtgtcagatacaagtcaaatttctttcttctgcctgtggatatatagttttctcaccaccattttttgaagagattatctcttccctattctatgttcgtggcatccctgtgatgatcatttcactgtagatgcatggatttatttctagactctctattctgttccattgatttatgtgtctatttttatgccattaccacattgttttgattttttgtagttttgtgatctattttgaaattgggaagtgagatgccgccagttttgcttttcctgctcaagattgctttggctatagtctttcatagttccatataaatacttggatttctttttctatttctgtaaagaatgccgttgacattttgatagggtttatattaaatctgtagattactttggataaaatactcattttattgatattatttcttctaatccatgaacatagggtgtatttctgtatcttctttaatattctacattaatgttgtataatttttagtgtacacgtcttttaattttctggttgattttttttccctattgtttaattttattttttgttactactgttcatataactgagtaatgtattggagaataagcttcagaccacaaaagtgcccggagaggtagtgatctatagattggtggtgtgtttaatttatacacacatacatacacccagagacacacactcaagaatggctaaataagagtcaaagagtaagaacagaatatgcaatgagcatatacttcatgtagacacatagatataatatgaccattaaacatgggggcagcataatcaacattttttaaaaaatcaagtctggtgcagtggcccatgcctgtaatcccagcactttgggaggttgaggtgggaggattgcttgaagccaggaggattgcttgaagccaggaaggagttcgagaccagcctaggcaacatgacaaaactctgtgtttacaaaaaatataaaaattaactaggcatggtggcgtgcacctgtagtcccacccgttcgagaggctgacccgtgaggatcacttgatcccaggtgtttcaggctgcagtgagctatgattgcacaattgcgctgcagcctaggtgacagagtgagaccctacctcaagaaaagatatatatattatatatatataatatttcctatatgtggtaggattaagatatttattatgagattattatgtatatgatgtagaataaagcaaatgagaaattgtgggatattctaattttatcattacctatgtccttgagagccagaagtattctagaagttctgcacattaaaaaccaccatcaataaaaacttaaggtaaatacaaagccggtctaacgtacttaatataaaaatcatctacacatttataagaaaataataacccaatagaaaatcatcaaaaagatataaccagggattttgtaaaataagatgtgtaaataactgtaagcattagtaatcagcgagatgccccctttttccctataacacttggaaaataatcaaatcaatgataaaaattataatactgagttttggtgagagaaactgcttatataatgcatttgacacttactcttctcattgagaccttaagttaccctgttaaaaagtgcaactcttcacaaagggctttatttttctgcttaacttttttccatagcagttccacagataatacagattttattcatttatctctctttttggcaatcttggagatgaggacttttgtctattttgttcactgctgtaaccctacacaatgccttgtatttactaggaattcaatgaaacttgttccgtgaataaatattaaaatgttttaaaatgatacatatttaaaagatttccctttccaagaatggattgtagtgaaataagatcatgtatagagctgtatctgcaatgatgtttattgaagaagtactcagaaattttaggaaaataaaatgtaaatatcacaggttagctcaagtaacttatgatagacccttatagtgaatattcttcagccatagtaggtaactatttctggaccagaacatatgactggtaagtttaaaatggttacaaaacattatgatcattttttaatgttataaatatacatttgttacagaatcatggtatggagaaaagaataaaaagtaaacatccacaatttatacaaaaatgctaaaattatgcataaaccaaaattatttctatgtggtaaggttatagttgattttatttcttcttttctctctgtcgatatttaaatattttttctttaataatttggtattactttaccagtagttcttcacaaagaggtcctaattaaaaagacttattttttagtataagcagcctctggtgtgaggtgtgaccagacgtcggtaatgtgggtaactttcctatattatgtttccattcacacagcttaggttgtatggacggtcatagcaattctggtcaggccaaaccattgtaatatgtgatccacattttattcagaatctttacaaaaaacagtttacgtctgaactgtgaatgattagtatggacgagaattgttaatgtgttcataataactgtgaatcttaatacattaacccacataactgttgtttttaagagcaagttatatggaatgtactgagccatcttgagattgaaagcagtgcctagattccttgttggactcttactccatcttttgtgtggcctgcaaattgacatgcagacaatggagagctcataaatgctagggggagaaaagataactttaaccataatttatcagtaatatgtagagataattcctaagaggaaataagatctgaggaaattacaggaaatattaaatctgtgattctgtttacggtagaaatgccgaccaacaaattccagctgtttctctgtgggttacagaagtgtcacaggcctgtttatagttactgaattgtagactcgaggctggatcttacagagccttgttggtttgatttggatttactcagatttgtccaaagggacatttcgtataggtaatgcatgtatggaatgcacccctgtaccaagtttttgttcctaaaaacttcttcttctctagtgtcttctgcttccctgccaacagtttgcctccccacaaatgttagtgtagttttgtttatttaacacttatatagcacttacttgtactgtgcactgttctgaatactttcaaagtgttaattcatttaacttatcataataagcttatgagataggcactattttttaaaccaacacaaaagcaaaaaccttgaaggacaagagtaataatttgtggaattaaagtagctcctatatgaaaaaggtaattaaaagagaagctatagtccaggagaagaaatttgtaatttatgtaactgataaaggatttatttctagactagtacaaaattcctgtaagtccataagaagacagtttcactgaaaaaaaaaaaaagaataaaacaggacaaccctcaacatctgatgacccttagtcccatgaaaagatgcttaatttctccaactgtgggaactataaataaccatgagatataccatgctccctctatcggacaatagcaaaagttggtgagaatattgagcatggtggaagtagtgaatggcatcaattactttaaagtgcaattgggcaaaatctaatacagctgaaaatgtgtctagtttctgactgagaggctctgcttctttctctgtctacccttaggaaatcactgataagtaaatgatatttactgttactatgcagtgtgctaagcaatttacaactactataatttccttagaacaaatgagaaaattggagctcagagaaattaagcaacttgcccatggtcacaaaagtagattaagattaaatgtcagacttatcttctcaatgaattttatttattgatttattgattatcttctatataaggcagcagtgtgtagtgagatgggctatgggcctggagtgtacagacttgaatgtgagtatcttaatacttcaatttttcatattccaaataggaagcatttgtcttttctcacagcattcttgaaagaatcagttcataaaatcgttgccaatattatgagacattttggaaccattgggttgatcagtggttagttggaaagaagtcagggatgggtagagcccaggcaacactcccagtgctcccaagtggccttgggggcggacagtagctcaattgccagtggcctaagggtggtcctatatcttagagtttgtttgcatttttgttaatatctaatgagtctaccctactgaatgaacctagagaaataccaattcaagatctcctccagctaagagatttgagccttcagatccagacattgccctatctacttctctaagcctcagtttcctaaatcatgaagatcataaaactcatgtcataggaggactagaaatagtatttcttgtggtgcctggtacataaaaggcttcagttaatgtagcactaagatactgtattttaaaaacctactgcctttttaagccctctgtgggactggcctttagcaccacatcacttacagagctttgtgtggtctactttcatgaacttcaccaccagaagtcaagcagtagaaggtggtgattaacacatgagcattggacccaagatagaatttctgcttggtgcataatgtttacgtgaatttaaaaggtaacttaaattttctaaaccttgatttgcttatctttaaagtgaacataatgatggtattaatacttaccccacaggatgttggaagaattaagtgaagtaatgtgtactagtagcttagcacagagccttgcatttactaaatgcttaataaatggttcatttttaaaaagttaatcttaattagttaagatttttatgaagatcctattgataattgggcttgtgactctaacccaaatctattcaaaactcatgtgtattgtagcacacttcctgtgtttgtttgaagacttccagtaacctgactgcctgtgaatttcctattattagtaatatttttaatatacatcagacaatgactttgaaggaatgtagaaaacaatggaattttattttcaaatatatgtgtctgtctatatatctagataatataggtatatatatatctatatacattctttttttttttttttttttttttttggagactcggtcttgctctttcacccaggctggaatgtagtggcatgatcatggctcattgtagcctcaacctcccaagctcaagtggtgctctcacctcagccttccaagtagctggacctacaggcagtcaccaccatgcctagctaatttttgtattttttgtagagaatggattttgccaggctagcctcaaactcctaagctcaagggatcctcttgccttggcctcccaaagtgccagaattacaggcatgagccactgtgcctggtctcatgtatacctaatttgtggagggtttttatcatgaagggatgttgagttttgtcaaatttagtcaaatgctttttctgcatcaagtgaaatgattattctgttagtgtgatgtatcaggtttattgacatacattaggttgaaccatctttgtatccctgggataatcgttttaatatgctgttgaactccatttgctagtattttgttgaggacttttgcatctatggtcatcagggatattggcctgtaattttcttttatttttgtgtttttgtctggtattggtatcagagtaatgctggccttgtaaaatgagtttgaaagtattctttcctcttcagtttttggaagagtttgagaataattggtatttgttctttaactgttttgtagaattcagctgtgaaaccatcaggtcctgggctcttctttgatggcagactttttattactgatattgtttcattataattcaattatggtaggttgagtatatttaggaatgtatctgtttcttctaggttatccaatatgctggcacatgattgtttgtaataatctctcatgatcatttgtattttgtgatgtcagttgtaatgtctttttaaatgtttttggattttatttatttgagtcttcttctttaaagaacttggacccctcaatgatttgttgagtttatcttttcaaaagccaattctttgttttgttgcttttttatttttattttttgtagttcctattcatttatttctgctctgatttttaatatttccattgatttataattttggggttggtctgtttttgcttttttagttccatgaggtgcatgattagattgtttattgttaatctttttactttttgatgtagacacttactgctataaacttccctcttagtactgcttttgctgtgtttcataggttttggtatgttgtgtatccatttatattcacgtcaagaaattttataatttttctttcatttttcttccttccttttttttttttttcaattgaagtgaagtcttgcactgttgtccaggctagaatgcagtggtataatcatagcttactataacctcaaactcctgggctaaagcgctcctcctgccccagcctccttgtactataagcaaattctacaaattctaccacacctggctaacttttttttttctgtagaaatagggtctcactatgtttcccaggctgctcttaactcttgttaaggagcatgttcaggagcatgttgttttatttccatttgtgaattttctaaagtttccgctattactgatatctatttttatactattttggtcagaaaagatagttcatatgatttcaatctttttttttttttttttttttttgacacagagtttcactgttgttgcccaggctggagtgcaatggcacgatctcggctcactgcaatctccaccgcccaggttcaagtgattcttctaccacagccttccaggtagccgggattacaggcatgtgccaccacacccagctgttttttttttttttttttttttttttttgtatttttagtagagaagggatttcaccatgttggccaggctggtctcgaactcctgaccacatgagatccacctgcctcagcctcccaaagtgctgggattacaggcgtgagccaccatgcctggctgaatcttaaattttttaagacttgttttgtaggctaatatatgatctgtcctggagaatattttacatgtagtagagaagaatgtgttggatggaatgttctacatatatatatttccatttggcctagatcattattaagtctaatgtttccttgttgattttctgtctagatgatatgtttattttttaaaatgtcatattaaaatcttttactactattgtattgccgttaatctctccttttagaactattcatatttactttatgtatttaggtgttctgatttgggtacatatgtatttacaattgttatgtcctcttgctgaagtgactccattattattatataaggtccttctctattgtctttacagtttttgcattaaagcctatttttttctgagtctaggaactcttgctttctttcggttttcagttgtgtgcaatatatttttccattccttcactttcagtctgtgggtatccttaaagatgaagggagtctcttctagtcagcatactacaagagaaagaaaagaaaaccaactggtttttctttccttttacttttatttatttatttatttttaattcattcaactactctgctctttttttttttggaagaatttaatccaacaaattcgatgtacttacagataggtatggagttaatactgccatttcagtcattgttttgtagttgttttgtagattctttttcttttctttctctcttgctgtcttcctttgtggttatttgaatttttttctagtagtatgttttaatttcttgttttttactttttgtgtattttttctttgtgaataccatgaagtttacaagaacttatgatttttgtaatagttatagcacgtaacaatagttatagcacattattgtagttaataacaatttttgattgcaacaacaaaaaactctacattttcacttcactccctcttctccacatgttgaatttttgatgtcacaacattcatcacattacattccatattctttaacgaattatcatagttgttattgtttttaatagttttatcttttaaccttcattctaaagatataagtaatttacacaccatcattaccatatgagtatattctgaatttgattgtgtacttacttttatcagtgagttttatacttcagatttttcatattactcactcatgtccttttctttcagcttgaagaacgatctttagcatttctggtaaggcaggatggatttccttagcttttatgtgtctagaaaagtctttatttctcctttatttctgaaggataacatgctgggtacagtattcctggttgatggttattttccttccatgtgttaaatatatcatctcactctctcctgacctgtaaatgtttctgttgagaaatcttctgccaggtgtattgaaagttgcttatatgttaattgcttcttttctcttgttgctttcagtatcctctctatggttttgatatttgacagtttgattataatatatatttggttagcctgattttgatgaaatctgtttggagatctttgatttttccatgaacaaatatttatatctttctccaggcttgggaggtttcctgctgttatttctttaaatgtggttgtacccctttacctttctccactctcttgaatgccaacaactgctcttttaatgtggtctcatacctccattaagcattcttcatttttttttctttttctccactgcccgtatattttcaaataatctgactttgaattcacagatgtttcttctacttggttaattctttttttaatgttctctattgcagttttttttttttggggtggggttcacttcattttcacctccaggatttgggatttttaaaaattattttaatttctctgttacatttctctgatatttgtttctctgtattttctttaagttcactgagcttccttaaaactgctattttgggccaggcgtggtggctcacgcctttaatcccagaactttgggaggccgaggcaggaggatcacctgaggtcaagagatagagaccatcctggacaatatggtgaaatcccatctctactaaaaatacaaaaattagctggatgtggtggtgcatgcctgtagtcccagctgctcaggaggttgaggcaggagaatcatttgaacccaggaggtcgaggttgcagtgagccaagatcacaccactgcactctagcctggtgacagagcgagactctgtctcaaaaaacaaaacaaaaaacaaaaaacaaaaacaaacaacagaacaaaacaaaaaacacacacacacacaaactgctattttgaatactttgtcatgcacttcactgatctctatctcttcaaggtcagtccccagcaccttattttgtccgtttggtgatgtcatgtttccctgattgttcctgatccttgtggttgtgttttgatgcctgtgaattgaaggagatatttgttacagtcctcaccatctggttatgcctagtaatgttcctcaacagtaaacctgtccagaaatcttgagcagacccactgtagtggtcccaaagcctatgatcactatagctattgcagcactagaaggagctctaagcccaggacaaccatggccagtgccacccaggcttgagttccttgacttatacagctggtacagaagctgtctggaatcaatctgaggaagactcaatgagagcaccagctttgtgtggaggctgttcgtgggttcaagcctggaagacctgtggtctgtgtttcctgcagcataatgtttttggctagtttctcttgtgtggtaccttcactggccagaatgcagagcaaccaccagggtttgtatatttgttgctatgagctccaaccctgtgctttgtttctaactgagcctaggtggtctagccctgctggtactctcaaaatttctcatgagatctcggaatggtggggaacctgaatgtctgctttgagttccacttttcccactgcagaaattgtgaatgtagggcaattcacagtgtgtggtgctgttttggcttgggagagaagtgacagggccagagaattgttcttcttaccatttcattacagtttttctcagttttttggtgcaataggatgtctcagcctctcaagtccttgaatattcagactggtacttttgcctgatgttagttactagttggatttctttgtggaggagttcagctatacaatgcctattccttcatcttgctgctgtcactctaaaagaatggatttttaaggtcatttgaattcctgagatcttatgactctggaaagtataggaagtccctaaattgaaacatgatgttttaagcatttttatgttagtcagtttttgaaatgtgaattttttttccctaagacatactgcaagattttctgcaagacatacagaatttagggactggtctcaaagaaaaattaagaggagatgctgtgctattccattttaatctaagagtctcaaattgtcgtccttctctcagtgtctgggtctgattaaacatagtctttccaaggttttaggagacaattatgtaccacattaattcaaactaatgtcactgagagactcttattctttccaaatcatcatatattcactcattcagcaaatactgagtgccagttatcttctaattactgtgtaaatggcagtcaagtaacagtctgtttttagtgtgagagaagatagtggtactggggaaggagacagtcaaacagacttgagatacaactaacattggtgactttttggaaggaggaatattggaggcaatatgtttttaaccagatattgctatagtctgggtgtgcggaatcaagggccaggactgtgatagttacagtgcgaatggaggagtagttgattctataaggcaattgtatctaagttgtaagaaatgatgaaaaggaaggagttccaggtttagccaagggtgtgagttctggcaagtgaggaatcctaggtttatgaaggaaatggaaatcataaaatcttccgtggtcatgatatcatggggatgctaatgcatctgaatggaattatcctatgatacttagaaaaagggaactagggaaaaaaaggtctgggctggtaatatggatttggatgtcatctgcatagagatgacaagatggcttaggtgagtaaaagagaacaaagagtactgggagtgtcaaaaaaaaaagcacaaatatccaaagcagtatttagagaaccaagggagggccgggtgtggtggctcatgcctgtaattccagcactttgggaggccaaggcaggaggatcacctgaggtcaggagtttgagaccagtctggcaaacatggtgtaacctgtctctactaaaaatacaaaaattagccaggcgtggtggtgggcacctgtaatcccagctatctgggaggctgaggctggagaatcgcttgaacctgggaggtcgaggttgcagtgagccgagattgcaccactgaactccagcctgggcgatagagcaaaactctgtttccaaaaataaataaataaataaataaataataatctaggaaaccaagggagaatggtgtcacaagaactccaggtagaatagttaacatcatcaaatactacatagtgatgtagtgtgacaaccatgaaaagaatattggatttgacaaatgatcactggagacctttcgagactgggtaagaaaaggcattcatgaccaaaccagatttcagaggctcgggagtgatggtggattgaaaacagatatataagagtaattaaaagggttaggaatgtctagaaaacaatttttttttcaaatgggaacttgtttttgttattgataataatatggaagatactactaatcagcagattttggatgcatcagaggcaaagcgtatgttgcctcctgtcaagtttctcatctacgtcagccatacatctctagtctcacctacatcagcccattgtccgcatcagtgctgagtaggtcagtcccctgcctaaagacctctctgggttccttgttgcaagaagaaatccaatattcttagcacagcagacaagttgctttgcattctggttctaaactctctgtcacatttcatcttctgccacttggggcacgggagatttcagattctttccaagttagatctttgtatatattgctctctctacctggaagagcctttctctcatctttcatatgtctaattctaacttgtctttcaacacttggctcaaatatcgcgttgtttttgaacgctttcctgcctccgtgggtccagtgcaagtctccctctttgttgcttcaaccataagttgtttcttcgtaactttgtttcagcatcctgcattgtaattcatctattttcatagctgtgttctccattagactatatgaactcttaacacagggacggtcttttttattgcaatctccatggcagatgcaaaacaaactcttgctaaaagcatcgggaatgaatgtgtatcaatgtaataatatatactgaggtatatacgatagaagtgaagaagcatattattagtgcaaaaaatgaacagtttcacctctgctccttcattttttagctgtgaccatatataatgaataaaatatgtgaagctatgcattctgagtgtattctgctacagtcattatgtgttagaacgtggttttggagttaagcagtctcagctttaaacatgacatctgactctaaaagctgaatgaatttgagcaagttaatttctctgaacctgagtttcctattggtcaaatgaggataatactgtatagtgtggttgtgaagataaaattgacaaaatatagactaaacaatttaataaccagcatttcgttgtcactaatgtcacaattatttccaactctcaccttcatgactgagatctcttgttagtttctgtctggtcttgtatttgtctcatttgcaactttaattcattttataaagagaaaaatgtttcatttcttaagtggaatgttgatgttaggaaatttaacatcagctgtgcttcacctatctaaatgataccatttgattcataatactcattcccagtattaagtgaatttacaaaaatctagaatgaaatatatgtgttgatttagtaagttgccaattaaatttgaattgtttgtgagtctccaaataatttcccagtgaaggccctaggttcacttgctaagctggatctgaggacattctttttgtcttatcttctgaaatctattgccctgagtgatttagatcagctttttaaattttttttagcagaatttttgtggttaataaaaacatgtgcttacagctttttgcataaaggattccacatccgatttagatcaagagatagatttttagaaaaaaaatgatggatatgtcctctgagagcagtggaatgcaacgatgttctgtctctctctgattgagttcatggcatttcagaacccttccacacccacacccacgcaaagacgcaaacagtggtcacaactgcagctcccgcagtctcatttccagagtgcatccattgttttccataacatgaaataaatccctctcttttgcccagtggtgaaaagcttatataaatactaaaacttcaactattcccctgagttttctgttggctaacctgcagccatgggttgtttggatattgacatgcattttctgtgtagatctttcaggccactttggtgagtccagtggtgataaattctgttgtcttgaaaatttatcaggctaactgttttaacactccatttatgaaaacttaagtaattgacaccctattcgaaaaggctgcaggttcaaagtatctcttttattctttcagcatatatcattttgatgatatttatctatatatattttaggaggccttggccaggagatgactggaacagtcattgaaaagaaagtaagaatgtaaagaattgattagagcccaaacatttaaccttgcattgttattcttatgaaagattttttaaaactatatttagaagtgaagtattttattgtataccaaataggggtagttaacattagtgggctgaaattaaaatgtataataaaaaatccttatccatcaaattggagagaaaatggaaggcatatacttaaaaacaaaaatcaatacttggtgtatagtgggcaatcagtaaatgaatgtgtggataggattgattagactcctagtgaaatgtaatactacctttataaaaaatatttattatatccttaagtaaaaacttatatgattgaacatcattgttcatatagtagccttattttggaacatacatttattccatttttttctttttatttctcgtttttcatttcttctcttacatagcaatcaatgaagtgtacttcagtattgaaattattctttttgtttgtttgtttgtttttttgagatggagttttgctcttgttgtccaggcctggagtgcgatggtgcgacctcactcactgcaacgtctgtctcctgggttcaagggattctcttgcctcagccttctaagtagctgggattacaggcacccgccaccatgcctggctaaatttttgtatttttagtagagacagggtttcaccattttggtcaggctggtctcgaactcctgacctcaggtgatccacccaccttggcctcccaaagtgctgagattacaggtgtgagccaccacgcccggctgaaactatttctatgctttttttttttttttaatggtgaaagaagtaaatttaatacattttcctctggagtctgcagatttgaagctaattctagctatgtacaggagaactgaagggaagtccatgaatactctactattgtttcactagccctttcatattagtaaaacattttagtctactttggctaatattttaaaaatgtctctttggttacctagattattaattaattaaaacaggtttgatattttaataatcaataattctgaaattcttcataccttagaaactaattgtgttgtggtgtccctatagatccaagattttatttctgtgttcactgtttttacagagaagaaatataaaacaataaatctcataaatgtgttagcttcccttccttgagacctattagagaaaataaagaaaatccatgtgcttttctgtctatgaagtccaattttaaattatagtagaaataaaacagacaaaggatttggatgaatttgagttttgttggttaaactgaaatatcactctttgcatgtcttgagttgtgctggttagtaaatcacagtgcaaaggttgtttgtaggccaatggttgtgaccattaatttttgtgtacttttcccaaagctttcttaaaacagctatattagtattttttttgttttgaagaataatatatcagtgcctatcctaacccgatttccactacctgagacctaaaagacatattgcccaatgacttcacgctcaaagtacaatgatattattattattaaattcataaattgctcagagagttcatagcaatagaaataggaagaattacatctctaaatgatggatttttaaacactagcacctgggtggctactcttatccaccacagggccactcaagtcatttcatacagacaaccttctctcaaatgaggtgtaaagaaagactaggaaacatagttttatgactattgcttgctttcaaagagggccacatgatagaagaggctgtgttacattccttcctgtgtaaaaaatttatccttgtttgtcttcttaggtttgaagaagaactgaccagcaagtggttatatctttttgaaggcagtggagtcccgtatggcccaatcaacaacatgaagaatgtatttgcagaacctcaggtttgtttttgaagtttaacaacgcctctgttttctgtccagattgacttatatcaaggtacctttgccattgatcgcaagcttaagtcacatgatgtgaattttcaccatcatattaaaattgtttgtgggtctgagataaaaagaaccagaacttagaagtgcctgtccataagcatacttatgtctctgttagatttaatatactgtatttcttcatcagccactacatgaagtttctgtggccagggtatttaattttcctgaaaaacagaaatatacacaattgagatattggggttgggtactcagagactattctttgtaggaagaaatatgagaactttcatacctctgatcatatgattatcttaaacctctgatcatatgattatacctctgatcatatgattatctctctgatcatatgattatcttaaaatgtacagagcaagtcatatttaattctgcagatgagaggactttgtttgctttgatgaatatgtgttatttgtaaggcataaattttacacagatagatatttgtgctctacgttgcttatcaggctcctttttgggctccaggaacagggtcacctgaaaatatatttactttataacattgttcaagtgattatttttagattatgtgaaaataatgttttgattttattacttcaatcaaaaaactacaagcaatttaccatttctcaaattcatccatcgatccccaaaagtacagggagtccattttaaagctttcactatgattattcaactgtcttgtcagtttccaaaattcaaaaccatggggtatattttcttgggttctttatatttatatcgtggcaggtttttcttagaaataaattactgagcatagaatacaccttttgagggaggagacctttgttggaaaacctttggtgccttttatcttacatgaatatctgcttaaaagaaaattgaaatattttaaatttaatggttactacatttactggagaaaaaaagtgaatgaattcaggaattctgcttgtgctattttttcggccaagattgtgaatatctcaaggctttgttcatgttaaaactttggtcaataatggtcaataagtatttgagataaaggggcccatttggtgtgtactatgtgaattcatctgaaagggaccccacaccatcagtggattaatgcctggtgattctttacaaggaggtagcattgtgcatactctgaatatagtagaccaggggactgtttttctcactttataactttgagtgaggccaagccatcatttgaagctgtcgtgtattgaggtgtacgtagaacttcatgtttacctcagtttgagggtacatttttctggagatatttcctaagagtttttccatcagcatttctattgctccatctgtgttttattagagatgaaggcaccaaagcaaagagttatttttaaataattatattatttaaaaatatattaagtatattctaacactacctattttttaggctttgataaacaaagatttataatcccacccactatcttaaaataattcactttattggctagctcaaagtgaatataggataattaggatttttataactaattttctcttgtggttcaatgtaattactttaatctttgcatctcaattcttctggaactacaaaaatttttgttattggtctatggcatattttcagtcattagccagtttccaaaatggagaaaatttatattacctaagtcaacgtacaagcttttcatactattacaaatgtctctacaaactgccctgtgtgtaaatttgtgtaaaacagattatttttgaaaaccctccagatgacatctaactgtgatgacttagttcattcatttattcaacaaacttatgatatatccagtgcttgtgacttagcagaaactcagtacacaatgtgtacctgctatttaagtccattttgaatttatttattagaaaggtaggggttaatgagttgtttaactctggaatgtgcaagttttccaaataatcaagttgctcctctgcagtcccccctcccctttttaaaatcctccccaccagaactatcatcctgtgtactcctgagtgaggctgacaagctctatcttcagggctggttgtaaaacccttggtgatctgagggaactcagtgtaacataatggttaagaccatggagtcaaaattggtgggcagtttattataaacttctagactttagtttccttaagtgtaaaatggtgaaatagcatctgagatactgtttatgaagggaacagcacaaggattgcaggatggtaaacagccaatgcctagtagtagctgtggttatgatggtgccctttaaggttatattcttgtttaacttcttttacttacctttgtgtagtggatagaggaaaatccagtgtagctttggggatggggatcattaagttaagcttgcactctactatccttttataaaaatatatctgcaaaatctatgccaagaagagaagttcccttcctcatttctgatgattgaaaatccttttatttttcattttccgtaaaagttttttctaagtatgatttccgtttaaggtatcctcccttgttttgcctctgatgagctgcagagtttcttggcgcttggtgcatggaaacggccacttctgttcagatgtgggaacgcaccactggcgcgtgtggcccactctccatgtgcgctgtgccagcacagctgctagttcaactggaaattgctttgggtgaagtacaaggcctggaacatggcgtaggaatggagactttgataaagtgaaaaggggtatgtctaacaacaacaacaaaagccaggattgggagactcagtaacggcagaaaaatttgagtgcctacttctcaagtagaccatttacagcatttcatttgtggtttgaacttggagacaacaaaaatttacttgatggtagaaactatttctagcctaacaatttcatcatagtctcatggattgaggtaacttgatttttcgattcaatcaaaacaacagatgatatttttttttcatggataaatgagagattgtctaccttttatcctctgattatatgtgacagacctttgcacagttaaagtgatcctgcaggcatacactgttaagtcaatcaagaatactgcaggctggttggagggggattggtctgcatttactgaaagttctgaggagtttttattcaaaacccttagagtgggagttttattgtctttctcaatgacaaattatctgtggaaagctctgtgcattatagatgtataatatagattatctgcatatagattttaatagccagtcatttttccaagtgctttcttaaaatatcttcttttaatcaagccaagattgtgcagtacattaaaggaattcttaaaaagtttcaaaaacttactagatgacctcagtatggtcctatttaacatacccttgggaacatgtgcatgaaatacattgtggtttgagggtttccaactgaaacacacttaaaagaaaatacagcttttaatagaaactattcaaattcctgcaaacataggtatatatctcaccactgagagggattaaaagcatcattgtctacgttgagaatgaaaagggaatgtgccattctgctttcaggctttgcttaagactttttacttggtgattccagcatatcaccatctttgattaaactgctcaattaaaaactatgagtgattgaagcctctgattagtgtttttctttgtcatggatgccatgacctgagggtagggaagagagggcacagggtgtcacaaacctggtgttatttaatagagtcttcacatttgtaccacacaagtcgaatatatcaggtgtaagacatcaccctgaagcatcacttctgagatctattgggaggaaaatatcagaactattgaaatatcacagctggccctgattttaactagtgccaaacacctgcaggctctaaaaggataccaaaacaaaaccccaccctgtggcagcaagccatcccttaacaaccctttcttaactttgcatcaccatcaaaattaatttaacattttctccagaaaccttattcttcctgtcccagaaggccattacaacccctttagcaaatcttttgtatgggatgaatatgtcatagaaacagagtgaagtcttgaaatatttgatggctgaaaattgtctgttttcatctcattatttgtataagcttttgaaattggagagtttattaatctctagactagctcatattatctgagtgattttgttttagcacattttggcaaaatatctgagcatcttattttttaaaaaaggccaatgttcatatagcaaacatcagaagcacccccaaaatacagttatttttcaagacctttctatcacacacacacacagacacgcacacacacaaacacatacacatacacatacacacaaacacacccacactcacttctgatgcattttaaagatcacctttcaaatgacattagttaatatttcttgaaatgcagtttcatagccctcagagggttatacaagtcaagcaaaattatattcttgtttctaatactgctgggaaatacatatatacagtggtctttgcaactggaaaactgttggtaaagatctgatgtaaaatagtaggtctggaaataattcctagcaggcaaggagataaaaacataaattttatgtgtgtctctgaatatacatgacacattcaactgatgtacaaatttagatacatcatattatttgtgtatttgttttatcatccctgggtgtaatattttaagtatttgaagaaataatgtatttttgatgtaggtgattaaataaaataaaaatggagagtttaagctcccagttttttattaatatataaagtatgaggcaatagtgtacagttttatcttgagttgagaaaattatcgtattgcaaaaaacttcctgtgttattatttaagaggaaatgttaaaatgtcgaataagaatcaaggacttagtataacattatgggcattttatgttctttttcttctatatacctacaaaatttggacacattttttatggacacaatgtctttaagctataacacacagggacataggagatcataatcatttcttcattcagtcatcccttccttcattcaatcatcccttccttcattcagtaaatcatcattgacatccactatgtgtatggtcttgtgtttggtatttggcaaggaatggtacgatggtagaaaatgaatcaagaggacaaagctgtcaaaatttcaaggactttgcagtttaggttaaggtagaaagtgttcagtgtcacagaagggttacccataaatgctctgagcatttctaatagcaagaaataacaggcataaaacttggggttttcttgtttaatgatgtaacaaaagtttaaaatctgacaaaaaaaatttaaaatgtcttaagcatatttgccccagaactctttatcctttcaaatgcctgttgtaattagtttattctattattaataaatttcttcttaatgactaagaagaagataatggagggtttcagcttttactatttagtaattttgaaattatttgtgaccttgatacataaaatatattttgatgtcttataacattattctttctctgtttctcgctctttctctagcatgtgctatagtttattcatcaagctccacatatgtactttatgttttctgaacacttctataatatttcagagtggaaatatatagtacaatcattgacttttactaaactttgaacttgcaagccaaagacataattgttttaatgtgtaaaaaattaaaatcaagaaaactgaattatactatttgggggcattttgcaacccagaataaagagtaattagtaccagctaatttttgaaagcagtttagcacagtgctttacaataaaaatctaatgcaagccatatttatgatttaaattgtgtaatgggcaaattttaaaaataaaatagcaaaattaattcaatattaaattaatagcaaaatgtataattttaattatatattttatttaacttaaaatattcaaaatataaatgcaattaaaattaaaggagaacattaatgaaacattttaaatgttgtgctaagtctttgaaatccattgtgcattttatgcttatagcacttgttgcagactagtctcatttcatgtactcagtagccatatgtggctattggctgcaatgttggcgggatcaagctagccaattataaaaatatgtgggagtttgttcttcactttattctccagctttcctcactttttagttattttaattttcatttgttagcctccaactaaatttaacatataattttagacttaatatcatcatagtatttgctttgaaggcataagaatttcgtattttaaaagtcctatatggagtacgtaattagcatgcattctactacccgtttctttttggcaacctcctaaatttgtattggaaggaaaagcttttactcaaacaaatgatttctatagtaacaaaatgaaaacaggtaataagttagcaactatcttttctcatacaaataatgtcagattttagggctttcaggcttggtttttttgagggagttgaaaagaaaaatccgaggcctagatacagaaaactatcaatattaaccttgattgagagacataaaaggtttgaatatatgtagagacgtagtcattcatggctgcaaacactgaatattgttaaggtatcaattattcccagattacttatcgctttaatataattgcaatcaaagtcctgttagaatatttttctgaaattttttagcaagtggtttttcaagtctaccataaaaaacatgtggacgagaatagcaaatattttgtatgtttaaatataagtaatgagaaggaagcaagcattatcatacataattaaatatattccaaaaccacaataatggggctagcaaaaaataaagagatagatcaatgaaacataaagaaaaactttaaaacatgcatagagatttggcatgtgataaaaatagcatgacaaataagaggagaaagggagacattttctgtttgaaataacggaaattaactgttacttttctcttaagattatatctatgctttatgcccagataatagaggtttcagagtttactgtagactatttttaattaaaagaaagtattcatgaaaatcagttagattttaagaaaaggaaaggttttctaagcatcaatgcaatagcagatgtcagaaagaaaagaaatcgataaatttggttagtaaaagtgaaaacctgtaaagtacatatcggtatgataaaaatacaaagtttagttacagagcaatattaagttattgcaatgaatatgaccgaatgctgttgtaacataaatatcttaagagctcttagaaacaatagaaaacactaaaatttccaagagaataatgggcagaagacataagatgccactttgtacaaactcagaaaatccaaagaatcaataaacataaaatgaaggtcagctttgctaaccgtaaatggaaagatacgttcgtcaaagagtacaaactttcaaatataaaacttttcatttataaaggtacttataacatgagtaagttctggagacttaaagtacagtatagtgactatagttaaggaaaatgtattttctacttcaaatttgttgggagaatagaccttcttcttttttaaaaaacaaacaaacaaacaaacaaacaaggttttgctctgtttcccaggctgtactgcctggataattttgtttattttttgtagaaatgagatctcactatgttgcccaggctggtctcagcctctggcctctgcctgtgctcctgcctcagccttccaaagtgctgggattatgtacctggccaagaatagatttttttttttctttgagcagtgccttggtctgttgtcctggctggagtgcactgacacaatcttggctcactgcaacctctgcctctcaggctcaagcaactctcatgcctcagccttcccagtagctaggattagaagggcgtgccaccacacccgctaatttttgtgtttttagcagagacagggtttcaccatgttggccaggctggtctcgaactcctggcctcaaatgatccgcacaccttagcctcccagagtgctggggtaacaggtgtgagccaccgtgcccggcctagatccagttgtctcggtaccattgttgaaaagacttttattttctagtgaattttcatgtcaattaatcttgctcaaaatcaattcaccattaatataaagagattatttataaattcttgatgatttaggaatgtcttatttagtatccactgttatgtatttcccaaactttctaatgttaatttctgatatcactcattgtgtttgaaaacatactttgtgtgatttcagctcttttatattcattgagtcttgttatgtcctagcatataatccattttgtagaatatttcatgtatttttggaagaatttgtattctgttggaatattttgtagatgtctatttggtccctttgtctgtcttaccagtatgaaggtatctctaattctagtaacatttttgttttaatatctattttctgatattagtgtagccactctattctctttcatggtggttgattatattatacatccttttatttccaacctgtttgtaactttgattctaaagtatgtctcatgtagatggtagataggtggatcctgttttttttctttaattcaatctgaaaatatctaccttttgattaggttattcaagccattcgtaatgttttgattgataggttgcatttacatctgccattttgctttatgttttctatgtgtcttatgtcttttttacccctctgctgccactttattgccttcttttgtactaagctggtattttctagcatacaattttaattcccttaagaatttttaaagtaatatctttgagttttcttattgttttatctaagccttgtaatatgcatctcaatttaccgaaattgacttcagttttgtactgatttaattacaacaaaacaatgttttctgctacacacttcctttttgtatgtgtgtgcatatatacatatgaaacacatctatgtatattaaaaactcaacaatatactcttatagtattagatttatttaatattatgtcatataatgttaaatcttttatggaagctggtgaaagaaataagagcaagtctatattgataatatttgttatagtaatctttttgttaaccctatcttattcttagtttcttgctattgatttgagttattaaatggtatctttttcttatttccatatagctttttgctcttactcacaatgattgtgtaattattgtcaaatatgttacatttatatatgttaaaggcctaacaatacatttatatacatattgtttattgaaattgctttttaaatcaatcaagagaagaaatattcaactgtattgttttgtgaaattgcatacatgattacttttactggtgctctcttttttatgtgtgcatggattcagtgtgttgatgatattagttactttcaccctaaaagattttctttggtgttcattttaatgtaagtctattagcaatgtgaatttttttccacgtttttttgatctgagattgcctttagtttgccatcttttttgaaaaatattttgctgggtatgattcttgttagacagtttcttcctctgaacactttgaatatgtcattccactgccttctgacttccattgtgtttgataataagtaatgtggtaatcttactagattcccttgagtgtaatgtatcatttttattttgctcctctgttcaaggacgaaagatttcctctgtctttgaacatttttggtatgatatgtctggatgtttgtggttctattaacagttaatctactttgagttcattcagcttcttggacgtattgtttatacaattgatgtgtttgagttcattgaggttcttggatgtttttcataaaatctgaatagttttcagccatttttttctttgatttttaaaaattcttctttcttctagtacttccattatacttatgttcttctattttattatgtttcatatttctctaaggctctgtttatttttctccaatcttttttgtctgtgttctgcatattgcttatctctattaatctatcttataagtttgctgattcttcctactgccagttcaaatttatggttgaacccctcaagtaaatttttcatttcagttattgtacttttggactccagaacttatatttggttcgttttaataacttgaataatttctacctccttattgatattatctcctttaggagacagtgtcaacataccttcctttacttctttaggcatggttttcttttgttctttgagcatatttataacagctgatttgaagtttttttttctcctaagtctaccatcaggatctcttcaaaggaagtttctgttgccagctttcttctttctgtatgttggtcacactttactgtgctttgtgtgtctcataattttttgttgttaactgaacactttagatctcccctccccgacctttaaggttgttttgtttgttgctcactagttcaaatgacgttaactttgcccaaccagttctgcgaaatgttcctcgccacccaccttttctacagtgcatagcttttgaggtcccagctctgagtctttccaattgtttttatctgccaccttggggtaggagattttaatcttgacctctaggggtcactcttcatatgttataagctactaattgatcaaaggttgttcttagccagttatattttttatcctttaccgttggatgtgtgtgcttgacttagagactgctatcacagttaaggtagtttactcacccccctacccctgctacccatccacattcagccggggtctggtaatgtgaagattccctctgccattgcttctgagaggacccagcctttagatatggacatagttgcccagacttccatggatgagtgtgattttgaagcctagctttctaggcattgcccttgggtcagagcagcttactgttcactcagtgtttggttagagtttaagtacctcgtgccagtgaggctactgcgttttgggtgggtcaggatgcaacctgatgaatactttcaggtctggccccaaattgtgctttgattaccccttcttggtaaagccgaacatatgtgtacatcctttcttgcatacagagttgcctgtgatctcagaagggctcatcttgattgtctcttttcttgattctattaaacttgcttgtctgctgttttgctagtatcatgaagctaacatctttctcttaattgctccccagaaaaacctgtattgttttcaacaatgcccttagacttagagctctccactctctcttccacgtaaggatagcctcctcaggcagagctggagaactcttcatccttatgacctacctttctgccaggccaaaaccttgttgccactgtaccagacttctggggtaagttccacttttcctgagtaacattcctgctctaagagtgagaactagaagtggtggtggtgagtgcccttagtctttttggcttggtccttctgcagtggatcgttttacctacaattaagctgtaacaggggcaacaagaaccccggtgccttggcctgccgtgcctaaggtagagcttccaccctatgtgtggggatgggatgggggaaggcagaccatgtcatttttgctatgtctgcctagaatatagcttctgcagcacaggctatgagaagtgaaaaacacagcagcctgctcctcatggggtaaagccatagtcctagagtagaaggtaggtggagaggaagccctccttatcttggctgcacctgcctggagtagactgcctcggttaaagcttttgtaatgcagaggtgtagagcttggtagtgatggtggaggttaatggaataagccatggctcaaatgccatggaccctcaccattcttactaagatttagttgattctcttgaatgaatgttttttcatttgccatatgacctacagtaatttccagagaatttcagtttaaaaaaaaaattttcaccagaaaaattgctgttttgctaagaagagggtatatttcaaaagtcctgtcctgcacactttaccctgcctctttccaagataacccaaatgtatctttaccctatcagaataaatgtgctaaatttattttactctgagcttggtgcttattctctttccagttatttcctacaccctcaagaatgtctgactgtgccctgctgtggtgttcagcctccttgccctgaccttgctagctgtgatctcctatctcgcttttttttttgaaagaaaagtgtggacgttttacagtagtgtgtttggagtaatctcccaaagaacacatgggccagaatcatcctggagctttgttaaaatttatgtttctggactaacaaagtccgttgatttctagtatctttcatagggcttaggaattggcataagtagattgccagaaattattctggtataaactatgtgattcataagcaactttatacagtcatattctcaagtttttctctcatgatctccctggttatttccagtttttagggataccttttttttggtcctttggccaaaatactatgactttcattaccctaatctactgtgcacttccgcagccacactgtctttggggctatgtggcaggagatcacaaagggaaaaagaccaatggtatttggctgtaccctttggaaactgtcatttctttaaacctagaggaatgtttcctttcttagggttttgtcttttgttcactcccattccctcttttgtcactgctgctgttaccattgtcagcagaggattgcctgaagtccagcgggtaggcaaatgaacaaaataatttttttttaattgagggttttttttacattctctctgagtgttttgcattccctttcctataagccagaactaaaaggcttctcctgggctttttctttccgtctgcttttcagggctcacttctttgtttgttgtgtgttgagttcagaccaggggatacaggagtaaaaaagttaatcatgttaccacttgtttgctggtatttgaattctgttcttcttcctcagtccatctgctgctatttacttttgaatcctcaaatagctgctccttgtattctgtccaggatttagagctgtgttcagtgggagagatggtgtagagttattgctccattgtacccgcaacctgaatgttccaactttaaagcaacattttcttactatttttgaaaaaagttttttgatcatttgcttgaagaaaatcctgacatagttgttaagttgaagtgctctaaaagtttagatattttgtaagtacttattcatgggaatttgaattttcatagtatatataattcaagctatggaaatatattgtataaaataataaataaccagaattataaaacattatttattatattgattataaggtaagcgaatgttatagttttggaaatgtatatagatatatttaataatactgtattgctttttaattacatatataattctgtttttttattaaaataaaatgattttgttgaaaagacagagaaaatctgatatagaggaatgaatggttagcttgttcttaaactactttccttaaatatcatttttctatataaggcatttgatagttatctagcacttattccgtgttctctggtaaacacagtgttttggagtgtgagggaaaccagaattttcagaaagagagataaagtatcagagtctgcattggtcggggtgagggaggaaaaagaaatcttgttttttggtatctgagcagtactaaataatctgtcccatactttacctcaaatataatataatcctggaacgtcttgtggttctattaagtaaggaagttttcacaaaatgataggaacatgacagaagtacaaagaggcaacgttaagcgttttcaacagccactttgggaccatttttgttacaaaattatattaatggattatacttttcggaataaaataagtattcatgaggtcgtacaaaaataagtaaatggttgaataaataaataaataaatgtgaaatgtagaatttcaattaataaacttagaaggcagaagagaaatagaaggttacccttaggtaaacaccacagtaataattgttgtgggaaaaaggaccattggtggatgcctcagagtcacctgggaaacttttccaatatacagattccagagctccaggaagagaaaacacaggtttaggatggagttagggatatctgaagttttaaaagattctgcaaggatttcattctagaactacagaatattttagatagagtgctgttgctgtgtacatagttttcacagttagacatagtatttttccatcatcgtcattacagaggaaaaagtaataaccttactgtggaagaatcttatagacatcagcttaaccaagtcatcatacatcccgagagcgaacttccatatcatgtaccccttggtatcatgtataatctcaatttcctgcccgaaatgcatggcttcaatctaattgtgggaaaacatctggccaacttaaacttagggaccattgtccctaagctgaccagtattcttcagaagcatcaaggttatggaagacaaagcctgaagaacagtttcagactggagaaggctgaacgacatgacacttgtatgctgtgtgggatcctagattgcctcctaacccagagaagagaacattactgggtcacttgacaaaattcaaactaagtctgcaggttagttaatagccctgtatccattttaattttttggttttgataattttaccatgattaggtaagatgttaatagtagaagttgagatgggagtatgtgaaaacttcactttacaacttttttgcaagtctgaatttattttaaataaaaagcaaaaataacacaaaacaaatttcatttcaaatatctcacattacataaatgcaaagacaaagagccttgaatttttaaaaaatgttaaagcgtataatggcaaagggggagccctatatatgccatggttttcatttttgtctcatttcacacttattgattacaataatcctccttttcttgttccaaaaacatgaaagaatgagtagtataaagcctgaaatattattaatatttcttcatcatacttgagattttatttttgatgcctgaggaccactaagacagctacacactcaatcaaatgttcaaatcaaatctattctccacacaattgtagttgatcccttgtcaagaatttaaatgaaagataatttaaattcatttttctttacaaaacagatttttgctaatttacaaaatgtaattaaatgttaccagaatgcagttactcctggaagtacttctctacagattctcagttttgcaaaatagacatgtctcatttaacttttttgaaaaatggtgtatcaccaaaattggtttcagatgctgtccaattcctagtggtacactgaagtgtcaatacttgttctaagaccttctatatcatgaggtggaggttctcaaatacattgtgcctcagtgtcacctgggaaactttcccaatatacatatcccagagctccagcaagaagaaacacaagtttaagatggagttatggatatctgaatttttaaaagattctgcaaggattccattctagaaccacagaatactttagatagagtgctgtggctgtgtacatgttttacacagttagacagacctggctttttctttgggctctgtcgtttactcagtgggtgactttgggcattactcaacttctatatgcctcagttttctttaaatatttatttattttaatgatttatatttcatttatttcatatacgagtgagatagtacatgcataaagaactttaaaatgatggaaattttttttttaagatggtaagatgtttgctggaaaatgtggaaaatgtggtgaaggggtaggtactttaggcagaagtagtaactggcatagaaatggtaagtgtgaaactgctggggaaatatgagaaactcaggttgtatgcatggccagaggatagagtgcagatgagagatagtgagatgagaatggggaatctaagagtcagttttggaatgcctgtatgccatgttggggagtttgatctatattcaaattgtagcaccatatactatgatgccagctactggaagtggagcagatagactcataccagcaggagaggattctgctgatcctgagtatcaatatccttctgggcaatggagcccagcatgatccgggatgtagatacgcctgtatacatctacagttgacaaatgtaggggagatcagtcccatggtggagctttagtttagaagatagcagtcttcaggtccaagccacatttaacacaacctaccaaaaatcatacatcgtgtgattttttgggatcttgcccaccataactgttcaacctttgtcttataccctgttagtcagaactctgggcctcagcttctggtaaactcaaattctgataataatcaagctatggatgaccaatgaatgagccctgtaaaagctatactgtgcttcaggttaccagaaatcagctactttagtatatggatatgtgtgggcatcttggggagctatattgaactacaactgggctaagctaacctgctctgagctctgtttttggccatttaggatcataaaacttgttttaaagaggcgttctgtgataagattcagttcctatttcctgagagctccatttcacttattctcaaattgtcactaaagtagggggaagccaggacctacctaacctcagggatactcttgtacaggagcaaacacagtaaggcaagatgctcttttatactctaccatcctcttacacaggcactcaatgacatcatggctttgaaaaagtgaccttcgtcctgaagatatttatgagctataattaggacttatttaaattaggggattctcctagagataatgcttactgtgtgatctttaagctcagggaagtatttttttttttttttttttttttggagacagagtcttggtctgtcacctgggctggagtgcggtggcgcgatctcggctcactgcaaactctgtctcctgggtttaggccattctcctgcctcagcctcctgagtagctgggactacagtcacctgccaccatgcccggctaatttttttgtatttttagtgtagacaggatttcactgtgttagccaggatggtctcgatctcctgacctcgtgatccgcccgcctcggcctcccaaagtgctgggattacaggtgtgagtcaccgtgcccggcatcagggaagtatttttatgcaaactttagtacaagtacaattaaatatggactgttttttttttcagtgactcagaaacttatgcatagaaaagaagatgccttaaattgacgttgatgtttcctttaggctgggcttcacagtcctgatgtagagtcaccacagctcagtttgttttctgagacctgaagattcagacttcatttattatcaaatatttcatgagtgccagctgtgcaaggcattatgctaagcaccaggggaaaagaatcacaatttaacttactattttacagaaaaatatgagatttattaacaaacaaaaatgccaagctaaggccaggcgtgggggctcatgcctgtaatcccagcactttgagaggccgaggaggctggatcatctgaggtcaggagttcaagaccaacctgaccaacatggtgaaactccatgtctattaaaaagacaaaaaattagccgtgtgtggtggcacatgactgtagtcttagctactttggaggctgaggcaggagaatagcatgaacccgggaggcggaggttgcagtgagccgagatcgtgccattgcactgcggcctgggcaacaagagcgaaactccgtctcaaaaaaaaaaaaaaaaaaaaaaaaaaggcaagctatgtatttgcgatgagagatttgcttcaaagccagcaacacatgacgtctctttaccacggcatacttttcaggtattaaggaactcatggagagccaaattaataatcaggatattgatgataaagatgagatttaaagaccatggaagttatttttaaaaacatgtttttatttttaaatgtgaaataatttgattcacagaatatcctgaaagtggttagagaggtctcgtggacttctcacttgatttccctcaataattacatcttatataattatagtataacagcaaaacaaggaatctggcatagttacaatgtgtgtgtatatagagttgtatgtcattttaatacatgtgtagatttctgtaaccatgaccacaatcaaaacacggagctgttccatcagggcaaagatctccttcatgctaccccttgagagccacacccacacccaccctcattcctgatccacggccatcattaatttgtcttccagctttataattgtatcaattcaaggatgttatatgaatggaatcatacactatgtgacctttttacaaaaacagctttattggggtattcacatactgtaaaattacctttttattaaagtagataatccacggattttagcacattcacagaattgtgtaaccatcaccaccatctaatttcaggacattttcataactgctaaaagaaacaccattggcagtcgcacccttcttccctccccttatcgctggtaacctaatctactttctgtttttatgaatttgcctattctgaacattttatgtaaacagaattattgaaaatgtgtacttttatgagtgtcttctttgacttagaacaatgttttcagtgttcttccatgttgtagcatgtatcagtacttcattcctttatatggctgaataatattctgttgtgtgggtataccacattttactcagccatttatctgttataggcatttgtattgtatccaaatttgggctactatgaatagtatgtctatgtaaattcatgtagtcttttgtatgagcatatggttttccaatgttctgagtatgtacctaagagtggaattactggggcatatgataactctatgttgaacattttaaaccatggccaaaatattttccaacgtggctgcgccattttccaaatccaccagcaatgtgtgaggctttgaatttcttcataactttgccaacacttctttatttttttccatccctctcttccttcttccctttcttctttcttcttttcatttctttttaatatagccatactggtgtatatgaagttgtatctcactgtagtttttatttgcattacactaatgacaatgatgttgaaaatcttttaaggtattattgacgcgttgtctgctttgaaaaaaagtctattcaaatcttttgtccttttaaaaatttggttatttgtctattattattgagttataagagttcttgagagcatctggaaaaatgtcttgcaaatattatcttccattctgtaagttttcttttcattttcttgattgtattctttgacacacaaaagtttttagttttgatgaagcactaattacccatttttaaaaacattattacttgtgcttttggtatcatatccaagaaactattgcctaatctgaggacatgaagatttaggaatatgttttattctaataatttaatggttttaccatttacagtcaagtctctagtccattttgagtcttttttttgtatagggtatgaggtaggagtctaatttcattcttttgcacgtgagtaaccagttggcacagcaccagttattacaaagactgctctttccccattaaattgttctggcacccttgttgaaaaccaattcactataaatgtgagggtttattttgtttcattaatttatatatctatccttttgcccataccactctgtcttgattactgtagctctgttgttaagttttgaaatgaagaagtgtctgtacctcatttttcttctttttcaagattgttttgtttttttctaggccccttccatttccacatgaatttttggaaaaccttggcaatttcttgtaagaatccagctgggattttgttaggaattgcattgaatatgcaattttcgttcatactgatgtcttgtcaatattaattaagtcttctgatcgatgaaggtgatatgtttttccatttatttatgtcttctttaattgcttccaaaaatgttttgcaatttttagtaagtaagtctttcacttctttagttaaatttatacctgagtaattttttctttttgatactattgtaaatgaaatttatttcttaatttcatttttgaattttttattttaattgctgttacatagaaattaaattaattttgtaggttaatcttgtatctttctatcatgctaaactcacttattagttccagtagcatttttttttttttcgatgtgaattccttaggattttttaaatgtaagctcatgttatcttcctatccaatctggatgactttcttttcttgtctttttcttttcttttcttatctttttctttcttgatctccctggataggacctccagtagaatgttaaatagcattggtgagagcaaatatccttgtcttgtttctgatttaagaaacaaagcgttcaatctttcaccattaagaataaagtttactgtgttcttttcatgggtaccttttatcagggttagaaggttcctctgtattttgagttgttgagtgtttttatcataaaagggtgttggtttcctttagctgtctgaacatatttataatgactgttttgaagattttatctgttaagtgtgatatttgggcctagtattgatgttcttattgaaatttagcagattttacctctctaagcatgtctttctttgctgtatgctctgaggatgatttatagaagtgttacatgttgtttttaataatgattttcaccacttatggttgatttgctgtagagtagttggtccatgaaggtcctcatgctgtcattctggaagttgccaccccttctacccatcccggtagatcttaaatctatattgctgtatgaaagaagccagccacaaaaggatgcatattatataattccaattatacaccattatctgaaaggaaaaactatggagtcagaaaacagaatagtggttgctgatgcttgagaatggaggtaggcggtgattacagaagggtagcacaagagaatttggcgggagattgaactcttctatatggtactgtggtggtggacacagaactttatgcacttatcaaaattcactcaagcctacagtataaatagtatatatatgaagaaaaaatcaaccgggataccaagagaacccaagatggaatccagaatgtgacaaatgaatgaccacactgaaatgggtagggaagaaagagctgattgcagtagccttgaaaccagttattttgaccagagcctgtaaggccaagcacaatgattattacatccaaacaatgtcttccaattggtaaatttgtttttcaaatgggtatgggctaacagttatgagactattttatctgtatactaggtttgaacacataagcaaatatattttagataatgaaagccagattacttatgttgtagaaagatgtcattaataaaccaagtgggaataatagaatgaaccaatgtcaactcagatgttgtttttaaaatgcaaacagatacttagatgcagaaataaatatagatatgttatgcatgcattaattagtattcatatatatgatgttctagaagcagttgtatcccagatgtcaggaacttatgtagctcccagatcttgttttccaaatattcttttcctatttaaaagtatcagagcttcttagagtagtggttgattccagggtgggtacaggaaaccatctaaaatatgtctgaaagtctagtggtgccagaaaagtcaaaaatatataggagctaaccaaaaagaactcccaatggccaaagttagatcaaatttcacaaaagataatccaaatgacaataaatagaccagaattatttgagttacaactcaaaagaataaaataaatattcatgatataataaatgcttaaataaataaattagggaataagggaatataataagttttctttataaaagttttccagttaacaaatgcaccttaactctgtgtgcttggtaacttctccagaaataagacaccaatatcatgtattcctggatataatttgcaacaaagggcacaccacttttgcgatagtatctccaaaagtccataacctcaatctaatcgtgagaaaacatcggacaaacaaattgaagtgcattccataaaatatctgttcacaaatgccatctccatgaatgacaaggaaagactgagtaactgtcctagaatgaactaaattccaaatgtgatcctgagttagatcctggtacaggataaggacattagtaaaacagggtggaatctgaataaagtctttagtttagttaatagcattttgccaatatgagtttcttagttttggcaattgtaccatggttatgtgagatgcttgcattagaggaagctagctagagtacataggaaccctttgtagtatgttttcaactcttctgtgtgtctgcaattatttctaaataaataattttaataaataaaatattcagtgaaacaacactgcataagagatggcacagaatgctgtatgttcagtagacacagaaaattcttggcgccaagaagagaaaggattgagaaaattttgacattatatgtctgaattaaatctctgaaataaattgccaggagaatagaaagtataataaacattttaatgggccaatgtataaaagataagacaagctgttgatatattttattagctcacaattacaaacaaagaaatcttatattaagttaataattaataaaaattacttttccttccagtaggagaaacctatattgcaaagacagattcagtgtgaaactctaatggagaattaggataattcagatagataataaaatagataatttagaaaggtgtccaacagactcaaatttgttgaagcactcatttcaactgctcatttattccagatactgagtaaatgatagagttaccaatagcaagtggttctgttatatcatattatgctttggaatttggactattttaaaaagaaggtggatagcttctaaattcaaagtttgaaagactatggaaatagacaatgggaaactggctttacttattacagacagaaagaaaaatccgacttaagagttgaccatcaattcatacttaggacatactaataccaagtttcttagacaaacggaataaaaacaaaacactaaaaggacacatggtatccttacaatactagaattttgatagttttcaacaaatagcattgaatattattagaaaagctaaagatgggacaggttaaataaattctggtgtctattaaactttggaggggtttttgtggttttctaagagttttggtcagaaaatctggcttttagtactgtaatctagagtaagtctgcccgtgaagcttagcttcatggtttatgaagtggtgcaaatatctatctcccaaggttatcttaacatcaagagaaataatggatatgaaagaactctgttaatgtattagtcattatattttaagcgaaacttctaccttcagaggagcccacagaatgctacaacacaggttgtagcactctgtacaattagcactctttcaaggcatttgctacaataggaggaagaaaagtacaatttcttggccttgacaaaccacattcgaggtgagagatttgccactctgtcttctcacttctgttatacttctggttcatggacacaagtgacccaggtaaaatgacttgaataagcatttcaattaaaaaaataataaattggcagcacatccatgtgcctctgtagagtgtctgaaggacgtgtttattgctgcaatttaggtggcagaacaaagaatggagatatttaaaggggacacattttcttgtatttatccttcagattgtcaggtatactttctaatattgtttctaaaataatatttcaactcaaaactagtaaataattttattgcaaatgtggttaaaggatttaaaatacctgtaattctcatacactggggaatacaggtgaaaacactagattataggaaatatgataaaaggaaaactagatattgtcagtgatatggtttggatctgtgtccccagctaaacctcatgttcagtttgaatccccggtgttgtaaatggggcctggtgggaggtgattggctcatgggggcggattcacattaatggtttagtgccatccccgtgtgatgctgttctcatgatagtgagtgagttctcacaagatgtgttttttgttttatttttttaaatgtgtagtacagtgctttccctgcctatctttcttgctcctgctccagtcatgtgaagtgctggctctgccttcacctttccacatgattataattttccctttctaatggaaaattgggctacacaatggaggcagggcgttctcttggaagtctcttagtacttccgtgttaaatagtagtaaggattcagacacttcaagaaagaaggcataggttactgaccagtgaagtcttggctgatgttaggagaaacagggaatagtgaaagaaggaagttataaacagtagtgacagcctcatgaacggttgcataaataaagactgtagcagctatgcctattttattcttttatatctcttcgtttttttctcattttattttttttagagattaacttttcatgtagtactaggtaagaaaattcaaatgagacagtgtctgaaattggggaataatgtagtatagggatgaatactatgattgctgggattttgtgtctactcactttgaagagatagtgtcttcatttgcgctaataatagttgcatctttgttaagtggaaacatagattggtggtgctggtattatatgaaagaatatatttagatgtgagttcaccaaagctataccaactactaagttgtttctcggctggatatttactcttctatattctgttttgtgatgttggacctgggattctataaaccacatttctgctttgcaacctgacttcatgtttgaattttacagagaagagacattagagggaattggcaaggtaggaagaggatgaaaagacttccccttttctgtttttctgctttctgttcatggacttcattttgtctatggttccaatagtcatcaccctagtaacacttgttcaccttggcagcagcagttctttcatgtaccagcaactaattcaaacttgtagtttctctaacacttgcaaattaatttcaaaatgtactgtctcagagaaaccaactctaactgggcaacccgtcctccttagagaggtctgagttttagcttcaaaagccctttctctaagtttctaagttattaattctaatgttttccattgtttatccccagccataggggtgataactacttacactagttgctaccattgtaatatcttagagttctctttttatccttacagttacctggttaacaacttaatttttttactaaattattctatcatactatccctgaaaagagaaacgatgtgttttctgtctcctcacttgacccatcctgatattgaatgtgcaagaaagaaatgttaatttggagaaaaaattttgtaggaaatatgtaatgtataataaaggaaaacatctcataaatattttagattttccatccaggcagtagctagactgagttcttctttttcctcttagttttaactgttgagtagacctgtttgcagttgctatacgaataacccacaaattgcagatataatacaaaatgtttgtcccatgtgcatattgacaagtcattttctgcctcttgttgagggtttcacgctgctattataggtgaggctcttaagaaatttcaactgacaaatattttgctaactttccaaaaaattttagaattcagtctgttacaaaaaatacattttatgcataaaagctttataatatgtaattaatgtttgccaaattattgaatgaagctgacaaaatatgggaagtgaatatcccttttgattcatatattattaacaggtaattttacgatagtgtcaatggaattaagaaagacatgaagaaagtccttatagcaaagactgagatatttagggaaaagtggtaagtccctttcaaccaagaatattggtggatattattcttttttatatgatattattggatattagtggatattattatttcttatatcaaaatcccccaaatgaattttatctaacatgcaggcatttatgatatctaaagatttatgaagccagactatcagcagatacaatgaaattatgtataattcaaataattagaaagtcttatggcttgacatttaatatctatcttaagaattttaatatgtaaatgtacctgttttctccatggaaaagactatgatgtcaaaggcaagaggatatcttagtatttttataacctgatgagtgtctgattttattagttttctatgattgctagaaaaaacttccacatagtggcttaaactaacacaaatttattctagttctggatatctgaagtctaaaataggtctcaccgggctaaaatcatgatgttgacaatgttaaggtcccattgaaggttctaggggaggatctacttctttgccttttccaccttctaaaaactgcccacattccttggcttatggcctagttgaaaaagagctctgagaatcctagtaaaggagaaaatcattatcaagataaatcccatgcatgcatggattgtttgctggactttttgttctgtttactaaccagtctatatatttctggagtaatttcttgctagtttttaactactgtggctacatagtacagtagtaggccaaattttctctcaatttttttcttttaaaacaaatgttcttgctgatttcatggatctattatatatagattttagaatcacatgagaggatttcatctaattcatagattaatttgggggcaaatttatagtttcataatattgaatctttctatagtagcatggtatttctctaggatttaagccttcttacgtttatggtaaggttggcagttaaaaaaaatgttttgcacatttactttacccttgtccttagttagtttattagtattatttgttttccgaatgagatctttaagagttttattttctaatttgtgattgctagctactgattttatatgttgatattgtttccaactggcttagtaaactcatatttattttaataatttcccaaatgttttgctggacatcagattgttggcaaagaatgcctgttttttaaatatgccatatatctgatgtctttttgctaggacatcttgtgtttgctaggacctacttttagtcctaagtgatttcttatgatcttccaaatcattaattgaatctttattctcatccatcttgctagtttgctcgtgtatttatttttaaaaacatttgaccacaatgcttttaatttccagaaatgttaattatttgtctccctccaattctttctgttcttcctcctcttcttctttgcttttttctgaacattgtttttaagggaatgctgtatttcttcagctttattgattataattataagaattctgttaaaatttctttctgtttctttcagaaattttaagggattagttcagatttctatgggattagttctatttgtaggatattgtcacattattggcttccgtagttttttaatagttacatttgaaggattcaattgagaagctttggtagttggagggctgtttcataaatgcaaagaggaattcctattctttcagcaatgatttgtggctgtgtcccaggaaggatgaccaaggtggtggtgtggtagagagtggaggggcatgtgtacttcacccctacactgtgagcctctggggcagaagcctttttccttcattaatatgtttatctttggcttctggaatagcactagctcaatatttaattcaaatgcttctatacaggttaagcaaagacctttgttaaactgttaaacattcattattttgtcctaacagttgtaaattcaatataacagaataatgaaattagaggcactgatctataattaaatcctggagagtaagcaagctttaatttattctctgctttaatgcctattctcacgttggcattttgcatcaatcactgtttgtccaaagatttggagagggatgaagaagagttactggaatgaacattcgtgacatgtttttaagatagtgaatatagaactgtgattggagtgtagggttcacataaggaaagagccggagataaagttgtagccaagctgtgaagatgtttatatttatgtcttaggagtttggaccctgtcagtaatgaagtattgatgggttttgtgcaagaaaacattgtgaggaaagtgtctgtatttgacagtggtgtcatgagaagtataaaggaaaaggattaagagattgttcagtaatctaggatgagagggtgagggcctgagatagtgtgaaggaagttggaatggaaagaaagtgacatttagaagaatctgaacataataactttacgatccggtgatttcttggatgagagagagagaaaatatgaatacttaacaagcataagggttttaagcctgggttactgaaaaagaagtgatagagttatagaactaaataaagggatcaaaaagaagtgcttgatactgattttctggtttagctgtcatttaaatacttagacacaatcatgttttatattttgaactcttttatgctttctgtgcactgacatcaagaatatccattaattacataagggagcagaggtgcagaagacggtgtttgcgttatgtgctggtcagacttggggacaatctggctgcactatctgccatccatcttgtctccaaggctattaagtgcatctgcctcgctggactcactccagctcccaagaatggaactaattcagaagttgactcatgaatatacagttacctgtcagtctttcaggaaaagttttatgaagatttttactgttaaatgttgctttaaaggtatgcaaaaatcctcttttgaggcttcctagggtttttgcctctgttgccattgatagatgtgcattcaggaaattcactcttctcataatagcattgttttttctttgttaattcttttcattgtgccctgtcaaacgaatgagttgcattgacttggtatatatagggttgccataaggattaagtaggagaatataagtaatatgccatgaagaatgctttgctcagttagccctcaatagctgttaactgttttcaccatcaggattcacagtttcaaggacttctctacttgttactgatcgtgctgtgacatttaaggcaatgtacttcatactttaatatgcattaaaataatctttagggtttattaaaacacagattactggacctcactcccagagtttcttattcagttggtcttggttggggcttgagaatgtgtatctctaaacgttcccagtgacgttgatgctgctgtttgggatcaaacgttgagaaccagtggtttgggagggattggttgggggaaaatttttgtttataatggagtcaatcactttacagttaagaatcctcctcttctgtctgcacattctgaacctagtctgctgtgctctttgtttttggaagcagcagaaaccagtcagcaggtgacaaatttcattattctactttcttcgaatttttccagagagtcctaagtataccactgttagtgctggcacttttctgttattttaaggatttgttggtttttccaaggtggttttcccttgatgccagaagatgtgaataaaaacattatgatgatgttcgggtctatcttgctatttgatatatggtggaatttttcacttaatactaattttttaagccatacttttctttcttacttttttttcagttctcatttaattagagttacaaatggcatcgcttataaacatacttattgtaagcacagcaatgtggctttcagtatctttgtaatgaaagtttaaactacttggaactctagcttacattcctttaagtctttatgatctaaatattcttttccatgatgccaaaaaggttctgtgtgatcatctaaagtttgaaattctttttcaaatcaaaggcactgccaaactcagaagcaactgtgtgaagaaaatgtgtggaaacaccactcattacaggttggtttataaaaagagttgcagattgataggtctttgaaaaatgtttggtgacacaaaactctttcaatcagttccaaatctggcaactctcttgttgcattagattctttttccttcacttttcttctctttctaacagagacagacacatcccttttcctgtgtcccattttagatgactgatggaaaagtaaacaccaaatatgagcatgtggggatggtttatttctttttacattgactagaaggcagtgttgaaagggagacactgctgtcatttcacaatgtaggaaatttagaaaaggtgttagagctgttttaaataatttctatttttggattatgccattcatgagggtatgtagtctttcctttatagaagaaatttgtttaaagtatatctgagatctcttggtgacaaataaacagtgtgttcaaaagaaaccctgtaattttttcattagatgattcatgcttaaaaatgtcaaatgatcagaaatgaaagacccaatgatcaggtcattagaaacatatggttctgggaattattatgcatgccaactctaaatatggaatctcagtccattcttttgtccttacaaagatagcagaggcttttatgcctagtttttttctttttacattttaaactcagtgcccttgcatttcctttacctatgaggtagtacagcctagtggatagatataagtacaacaggatgagtttgcctgagttcaaattctgactctacttatgcatggagtgatgttgagaaagcagcttagcctttctgtgccttcatttcctaatttgtaaaatgaagataataagtatacttaccttgaaagactacagtgaagattgaatgaaatcatacctgcaatgcccttagaacaattcttggtacataatagatgctcaatcagtgttggcttttattatttactttgactagactacttagtttgacttattgttccccctagagaggaaagattacaacaacctccatgtagattgatgtttaggatgccctttgggaatagatctgacttaaaatgccttaaatattatacctttagacagtcatctttatgaacattgaatatgtgatattttggtcataggtttaaagagatacacttctactattagaaatcattctttattatagtaatttctccacacattaagaatggaaaattctgttttagaccagtagatttagggagaaagactctatgatcttcgtttctgtcttattttctcagcagcaatggaaaggttgtaccaaaaaggataatttgttaatgatatcgaaactcttaagaatgacccaagtaaaatataattttatgaaaatcttttcttctgaactgtatatttggatttgatgtggatatttcaagatatacattttagaaatactaaaataatgtgtctagattcctggtaatgccaagttcctacttgttccttgattcccccaactcgttaaatcaatagcattcattgcttcttgcacaggatcgacccagatgacaataaacaatagagtcatcatttggctttgatctttcaaacatgtgtagcaagatggcagtcttcaagcaagcaccttttgtttgcaaaagccatgcttttttgaggtagaaaaaaggaggagatgtatattatggtattcttacaaattagaactcgatatggggatcttatagcagaacaaaacagagaggaacaatggacagaacacatgggaaattcccacaacataggaaggagcaaatctaccctgtactggggaagatcactgaaggggaagaagatcaagaaatttggcagaacagtgttacttctccatcctgtcacccttaggtgagatcttgaaactgggagtggacaagtaaaagtttaattgattcttccaaattccagaacctgggggaggttgtagaccctctttatagtgaaatgtccaatatgacattggggtggctaatgggagaggctaaggttaccttgaaggagtcttgcacactgcagagtcaacagtggagagcttcctctccacctcctctccagtgttcacattctgtgaggaccagtgcaccaaggagctgagtagtggaggatgcagaatgcagagaactcaccaacaggtgcagtggcaattccgtggtcatcaggtgtgggtaccgttaataaaccagggcagacaaatcactgttaccaggagaggattgctagcagactgcgcagatcgcaggacatttcagcaaaagccctgagaacccagaggagagaggaactagatgttccttttcattcaggaacaccctcttgggaagaaggaggagtatgaagaaaatgttccttttaattgtaaagttaaaggatttttttttccatgtataagaagacctgtatggaaaaccatatcaatgataaaaagtaaagttattaggttggtgcaaaaggaattatggtttttgccattgaaagtaatgataaaaaccgcaattactatgcaccaacctaataaatgaattgtagaaaataaactttacacccaccagctaagctattcattctatgttcaaaggtacaaggaaagttgacttttctgagggccagaaatgtggcagtataaacatagcttatttagcccagtgtggaccataagccctagagtgtcagtacctgaagattttttacctaattgctcacctctttccaatttttttgcctttaaattctatcctgcattttgctgctcatgtagtcatctgcctgcagtctgcctttctgtgtcacgcaattccctaactcaagtacctcagtaatgcatttctttataccaggaagaactgtaattcactcctaagatttgttccttgttttattactattttttgttccttttgaacaattctaattataacttatagcaagttgagtgtagtttgttctataatttttagcgacagaaaatgactgtttagaatcattttttccatgccttcactgttattctaaacataatatatagtttagactatgacaatataatagttttaataaaaattcaaactgaccaacagcaggaagtgtataaaagccttcaaatactactgctaaccaattgagttcagtgaccacactgaaacttgagaagagcatgcttacaatttagctttgtggtatattggagtcttgtgtgtcagtatgcatgtttcatgggatttgtaagctgaaagaccttgatgctaacttaatacaaacaagataaaatattcttagcagagtgtgctgaccatatgtgagattcatttgatgatgtttttcattttctttataaaacacatctcaggaccactagcagttattgttctgaaacttaaatgacacaaatgaagtcacatcattgtgatcagtgaatccatctctaatggtttaaattttagattcagctaatctaaactaaatcccttctatatcacagacaactaagcccaatgctttgtgtataacatgcattcatttaaacattggtttttttgttttttcgatcatgggttaggcgtgtgctaagtgcacgtgagacggaagagatagaaggcatagtttagggtctcaaagaacacacagcatggtcaaggagttggaataataaacaagtaaatataagggtaaaatttgtataagtttatcttggagcctagcgaatgggctgatcttctcatatggtcatggaagatttccttaagtctcaatgaattagtccctattacccaagtaaatagaggaagaatgcatcggaagccaaggggatgaatgaagctgacacctttcgagaacctttaggagtttgatttgaacagaacataagatgcacatggagaaagtgcctagatataaaggctgaaaagtaggatttaggggagatcatgcactatctaaacctcagaagagctctgtaaagtaactagtgttatgcttattttacccatgaggaaacagccttggggcactgaaacaactggctcacagccacacagtaaatggcagggtgggtcttctgaccccaaattctgggctcctctcattatcacagaggagttattggattttttttttgtctcttcatggtcctttttatttctatctatagtatcagtcattaatggcaataaaattttgagttggaattgcctaatagtagagaacaatgctactccaaaatttattagtaataataaatcatagctcttactcttaagattataagaagcaagaagttcctatctatcttcacagccatgtgtttaaagttgtattgagtatgagacaaatatattttaaaatatgtatatatatttttttatttttttattttttgaaatgggattctcgctctgtcacccaggctggagtgcagtggcacgatctcggctcactgtaagctccgcttcccgggttcccgccattcttctggctcagcctcccgagtagcggggactacaggcgcccgccactacgcccggctaattttttatatttttagtagagatggggtttcacctgtgttagccaggatgatctcgatctcctgacctcatgatccgcctgcctcggcctcccaaagtgctgggattacaggcgtgagccaccgcgcccggccatatatatttttattcattcaaaaaatatgtttctgccacatgtataggcaagcctttcattttgtccttctgggtaaccatttgttcagaagcctgggaagtaagggaactagcctaaggggtgaggccaactgcaaggttggtctcatacagatgttcatctggggttggttaaaattgttttgaaatttcttcttcagaaataaggatccaatgctcatgaatgatttgatgtcttagagtgactcaaagtatcagaaacattttaagtatttagtttggaaccattaaaatgaaacaaatgaaaatttagccatgccttatactccttgagtgaccatcaggaagaaaatagtcattcttttaagtgaaaatttattaatgtggggttaattcccctaaggagaggcctaatgataagcattagataggtatctgtgtgtgtataatttttctggaatggagagaatctgtaggattcttaagacccagtaaattctgaaggattaagaatcacttcaagtctgacaccctgaactgagcaagtatgtctgtgtgtgtgtgtgtgtgtgtgtgtgtgtgtgtgtgtgtgtgtatttgctgtgtttgtggatcgccttggattacttttaatctgtagtgtgaggttctctagagttgattctaggtaagcaagcaaaaatttttagacattttaggttaacattaggcaaagaaggtttttcgtttgttttgttttttaatattaagaggggatgttcataaagtaacatactgattccattatgtcatccaaacaatagtatcaacactatgttccacaacagtaaagctttaggacctgtaaattaatgtttcgtatgtgaattatgaatacaatattttaattatgttgaaattaaaccaataccacatcatcagtctctcagctcacatgagtaaatagaaatgtgatctttaatttttattgagttgcttaacagtttctgctttgtaaaatctgtgataggctactaaatccctttataaacccttccttttacccccaaaatattttcagatggtgcagaatataacaagttgctatagtaactgtgcaagctaaagtaatatgccctgtaatagccatgaaatacaagtagcattattttgaattttgtgttaaaaacagaaatgtataaaggtgatacaataataaataaaatttaattatgtgttgaccaatgaaacaaaaatctgtgagtcacattttcctcacctataaaatttttgcacattctcaattgtttcatatgtgtctattttgttaaagggtagttctaaactttcttttactttgcttaaattattgctctcaaaatataaacaagcttagtaatagtgtatctaatcaatctaattgatattttagaatatcaattaagtgttaatatttatattttactataattatgcagaaatatataaatccaaaatcttgttttatgtttttacagttttgtagactttttttgcatttggagaatatttttgacatattttccacaattgcaaagaaattttgaaatttagccacttctaaagaactacttctaattttgaaggcaaagaaattatctttaagtctacatttaacctatttaagagaattcttataacttagcatataaccaaaatttaggcaaaacataaattctgatctgaaaaatagtattacctacttgattttccatcacttatatgttctattaaataacaactttctaaaacatctagtgttttaataacttttgtgaacatttcagtcacacctaataatgcatcataatataaatacagcatgttttaaaaagttactcagcttcttttacattattactccctattggttaaaatattgcaaaatggacagtctttttacagatgtacacaaataacttacaggtttgggaacagtttgcaattctttaattgccattttctctgaaaactatcactgctacatccaaaagacatatgtgacattcgaaagtatatacttaaattttgtagctaagtgtttgtgtgtgttaatggcataagcttaggattggcataaatttttaggaaaataactttaaattggtaccatttaaaaaaatccccaatacctatttgtgatgatcttactatgttctcttaagactaatgaaactagagaaactctctttgagatggtttttgtctattgcctgtaacttaccacagattctgtttttgtggtgtgctattagttgtcacttccaatataatttaataattctaaggacattgatcttattgatagtgttcagtaagaatttgcttttcattatgccaatgatttcatattgaattaggacatatttgtaagaatcaaataattagttcttaatttctttttttttttgagacggagtctcactctgtcgcctaggctttagtgcagtggcacgatcttggctcaccgcaacctccacctcccaggttcaagcgattctcttcctcagcctcacgagtagctgggactacaggcatgtgctgccatgcccagtagctgggtttacaggcatgtgccgccgtgcccagctgatttttgtatttttagtagagacggggtttcggcatgttggccagactggtcttgaactcctgaccttaggtgatccacccacctaggcctcccaaagtgctgagattacaggtgtgagccactgcgcccggcctaaaatttctttatctttcattctgatttccagtaatttccgaataacctttagttaaatttgaaaaattacttatgccattataatggtaaacatgctttcaagaaataaaatgttttcgactataagttttgcctactctatttgtcttaacatatgtttataacttattggtgacaggtgatcacaaagagattttccccaaaactgaaatgatttcaaatatatttatttataagattttttaatgtttttagtgtttggtgagtgactcttctctatagattacattttcatggcagaacaaatttgcattcaattaaatataatatcttcattatcatttatctaaatataaagatgcaataaaacatagtctatctcaaaatttttataatttggagataagtttgtatatataatatcacttatttttaattttttttcctccaacttttagattccatgggtacatgtgctggtttgttacccaggtgtattgtgtgatgctgaggtttgggttacaaatgattccatcagccgggtgctgagcatgatactcaatagttagttggtcaacccttgttccccttcctccctacccccggtagtccccagtttctattgctgctgtctttatgtccatgtatagacattgttacctcccacatataaagagaacatgcagtatttggttttctgttccttcattaattgacatagaatatgggaatgcaaattagttcagccactgtggaaaggagttgggagattcctgaaagaacacagaactgccattcagcccagcaatcctattagtgagtgtatatccaagaagacacatgcacttacatgttcattgcagggcttttcacaatagcaaagacactgaatcaacctacatgccaatcagggttggactaaaagtgtggtacatatatactatggaatactatgcagccataagaaagaatgaaatcatgttctttgaagcaacatggatacaacaggaggccatgtcctggtcaggctggcctcgaactcctgacctcaggtgatccacccgccttgacctcccaaagtgctgggattacagatatgagccactgcatctggccttttgactttttattaatagcagttgactagtgtgagatgttatctcattgtggttttgatttggcatttctctgatgattagtgatgtggagaatttttttcttatgtttgttggccgcttatatgtcttctttggggaagtgtctcttcataccttttgcccattttttgatgaggttatttgttttttgcttgttgagttattaaaatttcatatagattctggatattagacctttgtcgaatgcatggtttgcaaatattttcttccattgtgtaggttctgtttacactgatgttagttttagtttggtgtgcagaagctttttagtttaattagaccccacacatcaatttctggttttgttggaattgcttttgagagaggaagacatttcatttttctagagaaagaaggaagataacaaatggaataagatcttgaacttggtgtaaatgggaaggtatacattctgaatgtaagagagagggataccttatgctctgagacaggcagggagaagggggcagggattgctggtgtctgaaggtacggggacagaaaatagaatgagttcatgctttgtttattttgtcaattaagtaggaggcaagatcatttgtgaattgtaagaaaagatggcaaggtaatttgccctaaggggtttgagaatggaaagttttggaatggctgtttacaattggatgtgagatagccacatagggccaggcaagtagttagctgtgtggcgttgagtcccaataatttaacaagcatttcctgaattcttgctacatgtcaagtacttggctaggctctggaaatacagagatgaaagatctggtcctggtccttgggagtttacagacatatcaatcactagttaccctgtgagtgctgctatggcagctgagaaggggaaagtctttctcagcttgggtaggagacagaaatggatacattttccctgaaggagagcttcttaagctctcgtatgtgctacagaatcatcttgttttcaggcaagttaacagcggaatattcttaaggtctaagttatgcactgaatggcatctaacagtacagtaggaaattaaacaacaaaatctaaaaataatgaacaccgaaatattaggcagagtgtttcagttgttagtgacaaagatccaaagtaaattaaagagggaaaaaataattgaaattgttgattcacaccattgcaacaatctggaaatcgcttttggtttcagaaatggctatatttaggggtttaaataatatcaacatgtctcaatctttctgtgactttgagaaaggagcatcctctgtactccagcagtttcatattgtacacctgtaagcctgtgcattcccctttgagaagtaaaacttgctcttttgctatagctgcgtggcagaactgtgagttccaggttcaggaaagctgtgttccctgtcccatctgcccaccgaatctgatgagaacattttgccttaccattatagttttaaaaaatgctattttttatatatttaaaaattttagggtaaaattatcaaatctacaattgaagcttcatctttattaacaaaatagccactaattacttgaacataattctgaatacataccatgctcaattctagtgttgatagttaataatttaaacaaaagaataaaaaaatgtacattagaatcttaaatgcagatgtaggcaaagtcacatgtgcttgtttgagaaaatttttgtgttgtataacttggaatagataaagcattataaaaccttcagtgcagggtcctccttaacattcaaatgtactggactgttaacagagatcgtaaagatttttaatgaaatgtaatccaaataactattaaacacttttcctagttttgtttaatactttcaggaaactatctgatcatgaaaatgtaatgttcctgaagcgatttttttaagaagtccaaacatggtcacatgaggctaatcttagacgatttaactacattatgagcaagagaattgatgtttcaggaagttgagaaaataatgtatatatgttttatataatcattgagaatcatttcagtgtaccctattgcatatatctgatttctgtgttcttttttttggttagaataatgaacacgatagctatgaaacattgtttcctttgcttagtttatttcgactctgttatatcctcatttgcattcatctgtaggtgagcaattaacattattatttgtgttgctcttaattcataaatattataccataaactgtgctttaggtagtccagttttattgctatgattaataactatgataattatttttatctttacatcatttaacattttgccataggaaatcatcactacagtaaaggtaatgaacatattcatcccctgagcattaataatgtttaatgcttggattttgaaactatgttagagagcagtttgaaggatgaagacatcaagattgtcactgaataggaaataaatgtcctggtatggaagaaatgaaataatatagaaagtttaaagtttctgcacaacccagggtaaaaaatgaaggcttatgactcagtctttgcagtaaaaatatctcctcccctccttcctaaaatggtctcaattagataaggttaccgttgtggtcaccacattttttgtaaaagcagggcattctgtcctctaagtttctggtcagaggttgaagcaatgtaaaacaaaataagcaccattgttacataagcactgcatgtagacaaggtatatttagctttgtaggtagttcagaataataaagattagaatatgaaggctgagcgtctggggaaatttttttaaagaaatgtttctgaacaaaaaccacagcacagattaaggattggtgcttacaatacaaagaatgataagcaacatgcattaaaattttactgaaggctgggcgcgggggctcacgcctgtaatcccagcactttgggaggccgaggcgggcggatcatgaggtcaggagattaagaccatcctggctaatacagtgaaaccccgtctctactaaaaatacaaaaaaaattagccgggcatggtggcaggtgcctgtagtctcagctacttgggaggctgaggcaggaggatggcgtgaacccgggaggcagagcttgcagtgagctgagatcgtgccactacattccagcctgggcgacagagcgagactccatctcaaaaaaaaaaaaaaaaaatttactgaagacattttcttagtagtgactgtacttggaagacccctgggctctttaaagtggtatgcagatgaagagagactgactaggatgccttggttgttcagggcagaaagaagacacagagacaaaagattgctgacctataaatggctctaaatggaagtccaaaacttacttttccctgactcgtcattgagattgtactttttattcatagtttaaccttctttactcaagatgataaaagagcaataggaaaatctggggaaaggaaaagatgggtaggaataaaaaaatgtatctatgaatgaggtgagaggacacagaattcatgctgtgtagtccagcacattcagaaatgacctcgaatttggttctgagatttctagcagcaagcaaaaagaaggcaaatcagttacaagtgtcacgcgtttcataagatcaaaaataaacagttgttctagagaagcaaaactcttcactggcactaaagggagacatttcttctctcagttgttttgtagttaaggagatggtggctcctcttctttggactccaatgttagggagaatcttctgattcctagaatattgaataaaaggtggaaatctcttaatgatattgtacaaagtaaaaaattttgccaacatcattttatccctagaaaaatgcgtttgacatttggaattatgttaagaatatgttattgtttccaatactaactaaataccagtagtaaccaaggtgctatcaaactatggatatcagtgatatttaacatgtttctgctattttccaggtcttgaagtgcattcacatttataatcacatcaaatttttatagtatatctggggagtagataacattatccctatatactggttttcctactggtttgaggtcaagagacttgcttgaactcacacagaaataagtggtatagttgggactaaaacatagaaccaaatgtttaaaatgtttttgtcactacagaaactacagttcaattttgcaaggaaaatcttccacttactcatttatcataagtataggcatgtcttttcaatacttattttatatattagcagcatccttttatttattgctgtaatcttgataatatggaatagggtggagaataatgggaataataaaataactatcatttaccaagtactttatcatttcatttatttattacaatagctctgtaaggtaaggaccattgtccacattttgcagatgagaaacaaaatagtaacagctggtatattgcagagccaaaattctaaacaggtctgcccaagtccaaaacccttatttctagttaccatgccatgtggctggacagcttttatgatacacatcaaggaagttgccatgatggtagagttaattaggtgtaagaccattgtcactctgtccttaccaggaaagttacagaaaatacagcttcctgcactggctgctaggtaaatgcctacttactctctggggtatattaatgttggcaaacagggcagttttcttacaccaggctgtatacctgtattgaaaagcagagctttggaagttgccaaggcagaactgccaggctgacttccatttggtccataaaagtgaataatgaagtgagtgtccctgcacatgggaccgaggagactgattgtgtatgtcgcagtagaactttagaattctgtgcattaacaccttcttccttccctcctttatggtatttgagatattaaatggatgctgctattttcagttcagctggccaagggaagtcatgggtttggcaagaagagagcagtaagagcaatatgtaactgttctcatccacttatacttccattccttccgttatttttgtgtttatgttttatttgttgtttcaggtgccatggtaggtgttacagtgagtgcaaaaatgaaggaaaaataccctataccttaaaggaattgataatttggcagtgggtgaagaggaaagataagcattttaatttaaaaatgccctccaggctctataagctaaatggccaagaaaaatagacccatgaagattaaatgcattagtaaggagagagatacaaatgaaagcaataataagatgtcactaaagtgacaataaataaagtggcaagagttagaaaaccagagagagccaagtaatggcagaaatgtagagatgtgggggccaacatggactgctgttgatattgcataatggcgcagacattctagagaacggtttgtcattacttaggcaataagattacctattcctgtgaccctgcaattcttctctttgacatatagattaagaaaatcctcaaacaggtctatattggtcagatatgaacatattcatttctggtgagcagtagttgattgtcaaaagtgtgggcagtaagcattatgcaataattagaaattcctgtggaaacttggaaggattgtaaaaaccagcatggtgcaatcaagaaaggagcaagagctctatcacagaatccagtaatataaatgagaatgaatgtataatacagtacatatttttcaaaagttacatgaaatatattagagtagtttcctgtgggaagaagagtctagagattggattgggattacaaaggaatgtaaatataacagagggactattcatgaaccaataattataatgttccattaaataaggagtatgctaaattcacacctgtaaactagaaaaaacaaaatcctggagattcagagaagtcacaacttgaagagtttaggatatatttcatggagcgggtggcatttgaggtgtatcttgaagaatgggtaaaattttaaacagatactggggaggacagggagctgtcacaggtaggagatagtggaatatatgaagaaagccttccaccagggaggagggtcaggaccagcaagtgcttggcaatacagtggcaaggggcaaggatcatttaaaagagaggagttcactttggttggagcagagggtatgtgtgaagcaaagtaaagataatgaacagttatttagcactatgtgtcaggcattggcctgaatactttatgcatagtatctaattcatcctcacaaaggccatatgacatagacaatgtaatcataaccatcgtcatcatcatcatcatcatcatccacctcacagatgagtaaaccatgtctcaaagaggtaaataacttttcagccacaggtcctgcaaatcctagagtcatgaggaacagccgggtatagctctactccctttctccagggatacctcacacttttgaaaaacagggctgttctctgtatccctgtcaatgtagatgcagagggtcttggcgatgatgtggttaaagtagtgaaaactcagccttacactaggtatggatttaattatcccatagtactgattagtttgatagcaaaaaaggatatttgagaaggaagctgcccatattataaaggcctgcctatataataaaggcctttttgctcatgtgtgtctcattgaaatgatggagtggctgtgccaacatcaagctaaataaggagaaaacatttataagcacccttttaactctgttagagctatgtattctgaaatcccttcaagtaacaaatgggtaagaacaaaaggggcagaatgggcctttcgactgcaaagactgaggctcaagctttagggaaccctgtttatgacactgattcgatatagttaaactccgagcttctatgtagttaaacatgggggaaatggccatatctataaggtaggattatgagtctcaagcattctgaaaaggaatgtcagacatgtctttctggtcaatgtaggaatagaatttgcttcatcggctaggtgaacatttaggccaattgctatggctgtgtcttagaaagtgacatttgtgacacgagaaatagctaagtatagaagcccaccagtgaacaacaaaagccaaaatgtccatgtgaactaatgtttcaatacgtctgtttttaatttatgccttcctttttctggcatctctacccatttctcaaattcctcccttgctatttacacttcaaaacatctgggattgggcttccagcacctgctgtaggaagcagagatcatcctgctgaaaatatgattttacatgttaacatttaaattaatattctttatttagttcaaaaacagtatgttttaaaatctagttctctaaaatatatgcagctcaaaaaatgataacaagtacaaaattttcacaaatgaaatgtgcaaacctgaagatcttgataaaataatttaaaaaatgaaggctgcaacacacagactgaaaacaggctcttcatagtttaggattggaagactctgccgtacatctgtttaacatcttgcagtttgaagaaccctgccttgcaaaaccttctgtaccaatgacacacaggataaaaggttatattatgactttcagatggaaacctgcaaaagtttatctggtggactggaccattaactcatgctacttttgattctaactgttaaaaggatttttcatgtgcaaattataatgaacttttaggtttatgtcagaaaacaccagaaagaattcttacttggagagagtgaacatgctgtggaatgaatagaatgttttagttgtgatgttcaaatggaactaaaattcccccagtagggagtttgtagagtgtgttttaataataagtatatgtgcctatatatttagttgggaacaaaagcaccacatttgaaatatgaaagtattccaaacttccatcactgccaacatttattgagagtttagctgagaaaacagaagcctgttttcaggtatggcttcacaaaaatgcccatatattgatgtgacaaaaatcatacttggtaaggaggcactctagtttggagtaatgtaatattaaaaattagagatcccttttgagatcagttgactaccagaattgtgttgtctttgcttacaacttacttggcttgggtgaaggtgggaggttttttttttttttttagggcagtttctgtacacacccggtgtcctgtgttaagctgtcatgtggatgtgcattttcttaatttgtagaaaggagatacttcctttttcctccataacccaggagtcttcactgccaggctctggcccctgtgtctccagcattcagcccacagatcccatatatgctgtggaaagctcactgtgccgcaagtgggtgtgtgagcaaaggagaggtagcattttctttagagacatccacaccctctgacccagacgaaggaagaatcttctttgcagcgggcttgctgcaagggactttccatgtgcattttatcatgccgaagctgacggtggtgacaagttccacattaaatctgtcttttctgaaatttcacattctcttctttttgtagggaaagtgttgtaatactctatcgcttgtgtaaacagtctcatttaattagaggctgtcaattttcccttgtgtaccatgaaagctgccttgcccccactctggggctgttgtagactttggttatgcagtgattacctaagctttggggagcagtggggtgtacatactgacattggtagtagccagcagttttcactagggaaatcagtttagtatactgttattaatttggtttagaaaatagctgcagagtgctcagacaaataagacatagcagaacacatggtgttcgttattcaataactatccttctggaaaggaagcatggtctatttcccatttgagaaggagcttacaaaaactagtaaatatggaaagagggcatgtactataattttatagaatagctctcctcatgcacttatacagccctctcctctcccccacacactccaatcacattcccacaacatgtccacatagaatgtattcccaactggtattagcataatcattaccacattataaacaagctggtggaaaaatagcctgaaagacttagatggtttgttttataaatgaaggtgggggtggaaagccagatatttttggaacaaattcctctgtctttagaaatgatagctcagctctcataaacctcaactgatagcatggactgaagaggtggagttgaagaaagtcatgacatattcggtatttctcagtgaaggtcaatgaaaggtctcctgtggagcctctctgctggaagaagtcctcatgatagaaatgttgagccttcctttcttctttcttactggagcacacatggaatactttttgttttactggtttaatatagttctgttggtcaaggtctctggctgtttctcctttgtctattgcatttttcctggagttgacgagatgagaaatcctgacttaatggctaattccaagtttactgccaagaccaataaaatatgatgtaaaatatggccttacctgaaagcttccggacattaacgctgttagatccagttttcattgtaaaaagaaaccaagacaaaggaaggagaataattttatgaaagtaagagttggtttgtgtgtccaggttctaagagatcagataacaggctgaaaagagatttggtgtaccatccttttttcttcctttctttttctgtttgatttttacagttatatagagaataacaaagtatgcttgccacagaagaatcatgggtgtgttcttttaaacatttgactttggaaatacccagagaactgtgtgatggggatgaagatggcattaatgaatgtgattcaaacaatgcactctctgtgggcttattgcatctgtggcctactgatttgtttgtaagattgccttaatttgatcagataggctcagtcatgtgtatctataaaatcagaatcatacatcatatggatcacatgaagttcaacatccaggaagttaatcttcaagcccagcactcaaatgtctttcacctttgacatgggatttctatttggaataaatttaacaacactctttcctcctgccctagctcagacttagacacaggacatcattacatgtagcagaccaatgggaaaagaattcacacgtatcacactggcatggctctttggaatactggaacctcactttaactcctgtgcgctgtcctcaaattacatcaagtgctgtggttatttaatgtttcattatcaataaattatttgatatgaaataattatactcataaattggcttttttccttaagaaaggtaattagattaagacaggcctatttcaaagtaatgtgcccattttttcattatatgtttgcaaagttaataaagtaattgatattgtaaagagtttgccaaaagtcagggcattaaaattaaagcctgaagtccaaaagagctggcttaatgtattatttattgagcactgatggaatattcagtgtaagacaacaaaattaagccaatgtattcacagtttgaataaaagcctctaaatattttttcctattgacaacagactcttagactcatagaatagaaaaggaccctggaagatttatgatctatcaaattcacattatagatgaagaatcagaggcttaggcgagggcagtgacttaccccagggcatagtagcccagctgaagttagaactcagtcctgttgatttcctgagactgacaatctgccctttttcacggattccaccccaggccatccactcatcctttttgctcactttctgcagtatctttctggctccatatttagcctctggccttgcccagctccgctctgcatgccattataagattaaccttcttcaagcataattctaatcataatcttttatgtattagagttctccagagaaacagaagcaataggagacttaatgtaataagagatatatctcctattgcttctgtttctgtttctctggagaaccctgacaactacagaagagactagtcatatgtatgtgacttatgagtaattgaatcatgtgatcagtcccaagatctgcagttgacaagcaggaaagccaggaaagctggtgatgtggttccactttgaggatcagagaagaccaatgtcccaactcaaacagcgaggcaagcaaagttccctcgtagcctttttgtccccattcatgtcttcggttgattggttgagagctactgtacttagtttgctgattcacaagttaatctcttccaacaacaaactcacaggcacacttggaataatggttgaccaaatgtctgggcaccctgtggccctgtcaagtttatgcataaaataaccatcataccttccttaaaaacttataatggctatgtcttttttattattattactttaagtagagtgttttatttatttcaaaacttttttatggacttaatcttattatatctaattttggattcagagagaaaaggagggaatgccaacattgagttccagattgttctgagatactaagattatctttcagctcttatttgaattacaaaaagtaaatgcatactataaaaatgcagataatagagataaacaaaagaaggaaataaatgttttccttaattcaaggatcagaggttacttctctttatagctttttaaaattttgtgtatgtgtagttttataaaatattagaaataatactctgatatattatcatttttcattcacatacatatacctatgaaaggattatttttaatcattttggtgtatttgctttatggatattttataatttatttaactaatccagtgttgaatatcaagattgtttgtaatttatgctgagatacagcttcatacatagagctttgcacatgtctgtttactcttttaaaacaaattcttacaagtgggatttttattttccttatcatgtcaactcttaactattttgtctccttttagccttataatcttagatatattttctacaactttttaacacaagtatttcatttagtgacctcagttttatactgtttcgcattctttactttttgtgtgttttaattttaatcctccaaataagctataaacttctttcttcttttctttctttcttttttttttttttttttttgtgattaggtctcattttattgtccaggctggagtgtagtggtacaatcatagctcactgcagcttcgaactcatgggctcaaatgctcctccccgctaaactgtctgaatagctggaactacaggcacaccccatggcacactgctaattttttaaaatttttaacggtttttgtaagacaggtcttgctttgttgcttaagtgcatcttgacctcctgtcttcaagcaaccctcctgcctcagcctttttaattgctgggatttcatgcatgaactatggcacccaactttttctttttttagtagactattttttagaaaagttttaggttcacagaaaaattgagcagcagatacagaatttctcatatataccacgtgcccacatatccatagtgtcccgtcatcagcattcccccacccccagagttgtacatttgcaataatcagtgaacctacattgacccatccttatcatcccaaactccattgtttacattagaactcactctttgtgttgtacatgctatggatttaaaacagtgtataatgacatgtatcatatccatcagtgtattatcatacaaaatagtttcattcccctaaaaacccgctggctcttcctattcatcctttcctatcttcggacacccaatccatgtcttcttatctatttattgaagggaagtatcatattttatatttttgtattgagtttttaagtaaacatgcaataattgacttgagtgtattgcctaataaccaccttgttacccggaggccctcactgagctctttccttggggcctctatattcaagtgggcatactctttgcccaacagtttctccttggatctccttctgatggccctcttggaacacttgtgaatgtatggattacaaccttcttgttctcctatttcccaccctattctttggttaaattcttagtgagggttttggcctttgcattgaaaagctgatttctggtataagaggcttcattatgtttctgctcaatataaaattctgtctctttcaagggagacttttatgtgttattaggtctgataatacactttctgtagacttagctaatgaattatgaatagaaaatattaaaaataaaactcttttgtaatgactaggaataaacaataaatcctggaataatgactgaatttagttgaatgtcaaattagaggtagccttaaagaaatgcaagcatttggctgaaattgtctaggaggaaaccaaagatggaaaagacagtgtacctctgccttaggaatttattatctagtgtgaacattggacacacacaactctctagtatgtcagttttcagtggtgatgcagtcagacattagcataatgtggtcggaacataagggcaagaacagttattatgattgattggcccaaggaaagattcattgagaaaaagacatttgaggagggccttgaatgataaatatgatttaggtgtgtgagttgtggaaagcaggttataagtgtggaaatagcatgaggaggcagtatagacatttgaatatacataaatgtttctgagttgttgaagagtcttgtgtagcagaagaaaaagatgaggggagtggacagtggaagataaaactggcagggtagctcggggtcagattctgaggaatatacagtgctgtcctagaacaattgagaattcatttcataggcagtggaatgcaactaggagaggattgtaaggaggagatagcatgtttgggtttatttcaggatgattactttgatcttgtcacaaaagatagattgcaagggctagacactggaagctgagagaagggttgggagactttacaatcagtggtttaggatatcaacaatcatcagttgctgtctatgctggtggctctaccacctgatgaagagactctaaacagtcataaattgttatctatgctggtggctctactacccgattaagaaatttaatcaaatttaaatcctctttggtcttgtctgtgactctggtcctcttccttttatgggatatgaatgccttctcctctgctattggttgtatctcttcgtatagggaaggactatttgtattgtgttcagtgttgctagtgttactaagtattcctgctagctaacaatccagaattgttcttccctggaatacctagtctttcatgaagttgcgtttgctttctgacaccaattctgctctattgtaccttttctcttcttgtatgagaaagcaggagtagaggcagattccatcaagaactgtttatgcctgcttgggtagaggagagcaaccacacattgaagcatttgttatacatacaatatcctttcagggctcttattctgagacttataaccaaaagcatttatttcagaaccatgtaatcatatgctatggcaaaagcattaactaaaggtactaaataattatttgaacagttaaatcaaatatgaatatacttccctttgtccaccagtttcaattcacttagcaggttcttcctagccagaatagccattgttctgttctttttccattttactctcattgtgtcttttgaggtgtcgcaaggggctctagatgtttttcagagttcacatacatttcatctttgttcttcaggatccatttactatagtactacagctctcctcttctggctacaaaatcttactgcagcactttcccttattcttgccttctgttttacccattttacctgttttcttctcttttctcttgtcttgtcaggtgcctgtggcagccttctccctgccttccctcaggcagcagtgtgccatgtctctgcaatgccttgttgctcggaggccctcactgagctcttttctcaggccctctgtattcaagtgggcatgctctttgcccagcaggttctcctaggacatcctcctcttggaacacttgtgattttatggattacaaacttcttgttctcttagttcccactccaccctttggtgatccttagtgacggttttggcctttgcattgaaaagttgatttctggaataagaggtttaagtacgtttctgctgaatataacgttctatttattttccttagggatattatgtgtcttttgagggagagaattgacttccaggctgaatgctaccaggaatactatcctctgtaaacatactcaacctatactcacatataactttaaaacatctttaagctgtctttcaaagtttgtaaacagagaaatggcttagttaaatcacagggaagtatacaatctaaaacagacagaaagagaaataaatatatatgttgtgctcggtcataataaacattgacagttcaggctgaagtgtatccatcattcactccacatacacccatgggcaccataagtgatcactcctatggatggaaggcagtagaaggcatacatcctgtccacaagaagagaccgttcagttggagagacaaacataaacatgatgactgattacaatgtggtaggataagtgtcacaatacagccatgtaaaaataatcttgaagacacagataagagggtgaattattctgaccagtacaggaagctggtctgaggcaagggtgctgagtcagccagcctgaggaagacagtcagagtgaaatcaaggagctttcacaggtcagcattgtacttgacttgcaagctgtgagaggctcccttcagctcaataacagagcctatcagactcatcaaacttgagctacaccatcttggaatgctttatcaaactttaaggatcccgattttctagaaaacaaaagcatctatgaggtgctagagaattgtcttgagagttcataggtcaccattccccacgtcacagcacactttcccttaacagtgtgacaggaaggcggcaacatctgtttccatgtgagtacactgtgatacattgaaagggacaggcggtggtttagtgcagcctgcgacttgtgaggaatttcatatggagagaattctactctgtggttctgaaattaggaaaaagaggaagttgcttttattactgtggcatgagaggcccctctgccctccatacctctgtttctaatttgtaaccatttcctgactgctgttcctgttgcatgcttttttcataagttactccatggcttacatcagttaatggctggggctgcactctctgagcctggagcggagtccctgcacctgggctcaccctactaatagatcacccagggcctggtgatggcctgcgaggacagctggaatggctcaactcccccactcatctgtcatgattaccatgcgttgggggtttgcctggcttgttccactcatttcctttgtcagcatgacaaagatcaaagtgcaagtaggatacataaatgataacctagaactttgcccaaacacataggctgcaatctgggtgacatcttccatcacactttccccataggcatggaaggaaaagggcaaattatgttttaagtgtagcctttcttgcccagccccttccagccccccatccccacccccaccacccagctttgtttcctgaacccatcatcgttgtattaatcaattggttcagggatttgagatttcctgacataatcacaggattggagaaatcctgatttctgtttatatgaagctgtggctgtgattgcagaccttgtacctggctgagcttgcatctttcgttccctattcagagtttgagatgcttctggccattctcctaaagaatgggagtgaatgatctttgcatgtctgttgagcagaagatatttacttgcagaattaaaataatactgataaaaagtgttcaaaatggtaacaatagtttgtggaaatatttgggcaggtaataattacttttggacttgtgttccccattcaaaaacaaaataccttgcagtgtttctgagtttacttttgtcatgctgtatacgttctctcttcaaaatgaaaactgatgcattaaagaaagaatgagttgaatttgaggtatgggtgcaaattagggaactcctaggaattaactaagggttattctttcagaaaataacattcagatagtgcaaagggtctttagttaggaaaatgtatatgatctctggattgatgttgtctttaagagttgtatcatacagaatagacatggaaaattgaccgcgaatgatgtaacccttgatcaatgccattgcacttgcatgttttctctatcgagataatttttttattttttataataatatatgagaatttctccatggatttacagaaatcacagctaatccatgtgatttctttctaaatatagatatttatgtatttatctatatcgatatatgtccaccctctacacgtagactgataatcattaactgatagtaaaaagctaaaaatgtagacactttccacaccatctacctcgtttactaagctgccacattatgtgtgtgtgtgtgtgagtgtgtgtgtgcatgtgcacaagctgggctatgtttcaaatgttctgttttctttctcagaaactattgatgtgttttggaaatattgaggatgcctccaatgcgagtatcccctatatcagatagtggggcagccctgccctgggaacttagacaactcagatcagatcttcccagtgggctaacctggcacctaacttcttcgtgtttcatgttcctcacctgtaaaatggtgataacaatgactatctcaaacaaggactgttaggaggattaaattaaaaaggctaatgtgtgaagaaaagttgcttagtgcattgaactctgactctggggtctgcagatctggatttgaatcctggcttttctacttaaaagctgtgtaacttaggcaatgcatttaattctttgtgctcagcaataaatgttgtaaggcatgtaagtggcatagtgcccgacacattatgagcactcaataaatacttgatattaatgttaaattgtaaatctgcgcagatgataactttttttgatgagctgataataagataatgcctaactctgatggtggatggtttccctaaatgtaacaacagatctggagagtttagtggcatgtagattgtcattttgttcattcataacctgccaacttgttagggaatgaatctttttgtaggtttaagctaaaagtgtgattgcatgcatttgtcttaaagacaactggaatcatttagcttgttcatgttttagaacacttccatggtaaatgtgagagttaaacagcatagtgtagttgtagcttctctgtactatgttttattgtgtgggtaattttaatgaccaatgtcttgagggtaagaatgactttggtgtttcagctaaaaagctgacttttacagaagaggtgtgttgtatttattgatatctacagtctgcataaaaatgttcccttgacttcccttagacttgtgtttgtcatattcttaatttatgtcatatatgtcagtttctcatatattttcctcctatcaacagttgtacttttgagcctaacagatttttcctcttccagcatctctcctttctaatccattttgcaaaacttgacaatcatttacctaaagcatgacttctgtttatttcactcctctgcctaatggttcctcatcctgaccttaatgcctgtccccatcatcatacattcatgtcaccattctgcatatcctggcccatgaaactgctattccttctgcatatcctggcccatgaaactgctattccttcataaactatactttaatatattaatggtcactgctcaacagttttttctgtagtaaatatctggtgttctatatagtatttgacatatgatctcaaagtagtacggcctgccctcatcctcttttgaccagtcattttatgaggcagtgtgggtatttatgagcccccagagctggaccagttcccaaaggaaatggaagatcaagaactctgagaacttccaggaaatggatgggaggatggtcagctctcgatggtccaggatgcactctctgatcaatgaaacccttcctctttgtctttttttttttttctcactgattaggcctcatggaattctgagcctcaagcttgttcttcacaaaaggctgctctttggatgactgtcccttcatctagtctaaactcccttttcagtcctgggtgttattcattccagaccaggagtgtgtatgagtgtgatgctgggctggtgggtcccaggtggcctgatgtctagcgcttggttgagctttcacaggcccatgatcctgggtgtgatagaacagtatctctccaacttaagcaggcatcacagtctcctgcggagctggtttacacgtagcctgctggaccccacttctgagtgtctgattcagtaggtcttgtgtggagcctgacagtgtgtatttctaatactttttggggaactcatgacaaattccaatattccagtattctaacaatattgtaaggaagtacaatattgctgagtggtatgattatgaaagtgctcaataccttcatatctcggtgtggctgctcatgtttgaatggtcttgtaggctttccccaagtctttccatttacaacacctagatcaaatgctacatctttaatgatgtttttgtgactcctttaaccaggggataaaacatttgctgttactcttctctctaacttcttagcaatgtgtttgcccctcttataatatttatcaccatgtaccctacataaagtatgcctgtctttctgccaacacataatctctttgaaggggagtgtattggtctcattcatcttgcttcttctaatgcttggtacagtgccttagatgcaatacatattgtttgccctgtgcccagatcccttgagtccactttttgacctctgttaagtctatcctccaccttcagcacgctttgttcctaacaacttgaacttgtaactttctccagaggactgaacttgaattactggaggcacttcactcagacatatggaaagctgggattgtctagaagtttatctccacagcagtgttatgctgcagagtggtgcagcagtatgaaggccctgcttcttgccttgaggtggacacactacagctccgcaggattaggctgaggcaggcccttcaaacccttgtttggattcttccccttctcagtcctgctttccttattcctttgactgatttctcctgggagcacttcactaatgaatcacctgcacacaaactcttgtctcatggcttgcttcaggagaactagcaggtgttgtgtgaatatttgtagaatgaatgaatgcttgaaaaggagtgtagcataataggagcgtggactctgtagccagactgcctgggtttaaatcccagttctaccacttagtggccatgtgactttgaacaaattatctaacctttttgtgcttcagcttttttattcatatactgaagctaaaatagtactttatatggggttatgaggattaaataaattaataattttaaagcacgtggaacagtttctggcacataataagtggtgattaagtgtttgtaagaataagctttaaaaattgcgttgaatgacattaaaatacacataagtaaatggaaagacatcttgtgattatggattggaaggctgtattagtcagatgattctactactcaaggcgatctccagatttaatgcaacctctatcaaaatcccactagtgttttttacagaaataaaaaacccatcttgaagtgacctcaaataaccaaaacaatcttgtaaaagaacaaaggtggaagactcacacttccaaattgcaaaatttacttcaaagctataggaatcagaacagtatgatctgacagacggacaagcatatatagactaatgtaatagaattgagagcctggaaataaacccaccacacatgtggggtaagctgaattttaagctaggtgccaagactattcaatgaggaaaggaaactctttttcccaaaagtgccaagaaaactggatctccacatgcaaaagcatgaaattgtatcctatcttgagataaaggtataaaagtctcagaagaaaatacagggggaaatcttcacgacagtggatttggcaatgatttcttggatatgaccccaaaagcacaggcaacaaaataaaaaatagacaaaatgggcttcatcaaaattaaaaacttttgtacatcacaagacactatcgaggccaggcgtggtggctcatgcctgtaatcccagcactttggtatgccgaggtgggcggatcacctgaagtcaggagttcgagaccaccctggccaacgtagtgaaaccccatttctactaaaaatacaaaaattagctgggcatggtggcatgtgcctgtagtcccagctactcaggagtctgaggcaaaagaatcacttgcacccaggaggcggaggttgcagtgagctgagattgtgccactgcactctagtctaggtgacagagtgagactctgtctaaaaaaaaaaaaaaagaaaaaagaaaaaagacactatcttgcaaaaggacaacccacagaatgggagaaaatatttgtaaattacacatctgataagggattaagaatcagaatatttaaagaacctttattggtcaacaacaaacaaataacccagttaaaaaatggtgaaaggtcctggatagacatttttccaaagaagataaacagatgaaaacagatcaataagcagatgaaaagatgctccacattattagtcattaaggaaatgcaagttaaagcacaatgaaatactacttcacactcattgggatggctattccatacaaaaaaaaaaaaaccagaaaataaaaagttttgatgtgggtatggagaaattggaactcttgtgcagtgtaggaatgtaaaatggtgcagcctctgtgaaaaacagcttagtagtttctccagaagttaaacataaaattattgtaagatctattaattccactcctgggaattactcccagaagaattgacagcagggactcagatacttgtataccagtgatcatagcaacgttagtcacaatagccaaaaggtgaaaacaactgaagtgtctgtcaatggatgattggataaacaaaacatagtatacaatggaatattagttataaaaaaggaatggaattctgatatattttgcagtgtatggatgaactttgaaacattatgctaagtaaaataagtagggacaaaggacagatatcattaggattccacatacgtgaggttcatagaatgggcaaattcatggagattagaaataaactagatgttaccaggcttcggttggtggggtggggagcagagtgaggagttattgtttcatgagtaaagagtttctgttagggatgagtagaagttcaggacgtagtggtgataactgcacaacattgagaatgtacttagtgcaattgaattgtatactttaacatgttaaaagtggcagattttatgttatgtatactttaccacagttttaaaaaacattaattctagtcttgcattttgttattcttgctctgcctctgggacctggatatatgcatcactaatgctgcttttctctctcatgagggaaattcctgtgaattgtctataagcatttaaacaatatgcttggatagctgtgaattttttaaacatccagttaagaacagagaaaaaaaatgctgtatgtaaatatgaataaacaaaggcataattagattatttcaaaattctttaggtttactcagaatttgcaataatcctgtgagtgcagtgagtccagtttaattattgataccataaagcagtctgaacctagagttttcttcagctttactgcttatgattttataaaagctctccacatgggtccacttggtttgggcttataggcaaattggtctccagccagatgctccatctccttacatgtcacacctctccacagggctgaaatgttcccctgaagagaaactttttaaaagcccacaaactccaatttagctttggcaatcactgcgctgtggtgtttgagtgttttagacttagcaataaataatgttttaaaacttccaatgttgtatgtcttatttgtcgtgctgtttgtatctataggcgacagccctggatatcacagtatatgaaatgtgataaagtcacccagtggttacaattgtcctacctgtcccatagcctcacatttccctcatttttatcataaatggtgaaatgaaatgaagaagaaagggggtgagaatgtgtatttgtttatgagatagtgtccctcaaggaatcagttgataagtttgactaatctctgtaacatttactctgacacactttttcatctttgtttgctatacttatacattactatcttaaaaactttttggttttcatctgggaagcccagtactgtggatgtgtgggatggagaactgacctatttaagtatatgtcatttatatgaaatttcatcaaagaaaatgcaatagcaacaaaaggccaaattccatttaacaagaacttttgaaactttcaccactgtcacagttatttcaaacaaaaccactttaagtctgttctggaataagacagtgcgtaaagaggtaatgcaatatgttaaactaatgcaaaagttttggtatctggataggcaatgatatattttaaccttttctattttggattcggatcaggtcttctgttgtggatcaatggttcttaggcaaaagggtagtttgctatgaattatcctatttaaaatatcttgttactagtggttctgttcttgaagagtgtaaatataacacatctccccacttcctatgcgtggagttaactatgacaagaaatgagtggccctaagcatacagctaggtttatcacatgagtgtttagttagtgcccactggttgaaaatctgagcatttggaaagtgatacacacacatgtgcatgcatgcatgcacatatatatatacatgtgcacatcatgtacacatgcatacatgttttccctctactttttgggtggagggccttgtagaaaataaaatgtccaatgggcagagagacagaggaaagaatgcccatgggacaaaaggcagcacagagatgtaaaactagtttctcattgttacttgctttttccacacaagacagaatcattcttgcctagggttaacactgtcagagcatactcccttatggaaaacacagaacttctggaacatcttttaggaatgatgtaccttaaggtgaaatccaatactccaaggatcttagagtcctgagtagagattatactgatagagacaaattggttatttccacccaaccctccaaatttcactgtttggctttgtattgaaaattgaaagtatgtctttatttatttacttccagtgtaaaacttgcatggtaaaagtttgttgatgtgcagtgtatccccagtgggaaattactagaactaagaagactaggaatatttgttttcaaatagatttttaaattgaccttgatagttttcaatgtttcttaattagtgtttgcaaatctgctgattttacgaaaaatctgtttcttgctgtattagagtatagcatcacaacaaaattagcattccatatgttgttttgttaaacatccttggtgactttccttaaaatcctttgggaaatgttttgaaatttgttgaaacaaatatgcaacacttgaaattaaatggtgattatcaccacattgttccttcttaaaagcattgcctgtgtttggacttagtagaaatgctatcactgaacacatatctttcagaaattccttacgagtgggtaaggcctaatacaagcctttttacacagactaggaaaagcaacttgctacagaattctagcaatgccatgacgctatgtgtagtagatagactttaccaaaagctggagtggcaagacccatgtataacagcctttattggatttcttccttctctaattggaatgagcaaattcagcttccttttcctaaaatctccttcagttctcataagtagaaacagaagaatgtatttcatctgaaattggagaactgggttgcatctcatggtagtaccactcatttttaaccacttattgaaactgagagtcctatctgtgtcttcattttagatttaagatttagtcaacagatatattgaacatctattatgtgccaggcattgtgcttggggctaaagttaccaacaggaataagacaaacacagtggattcaataaccctactttgaggacatcataacttgacaggggagataacttgaagcacaacagacctgtggggaggggttcacggatgattcgccagaggtggagatgcttaagccgagtctttttttttttttttttttttgagatggagtctcgttctgttgcccagggtggagtgcagtggtatgatcccagctcactgcaacctctgcttcccaggttcaagcgattctcctgcctcagcttcccaagtagctgggattacaggtgcacaccaccatgcctggttaatttttgtatttttagaagagacggggtttcaccatgttggtcaggctggtcttgaactcctgacctcctgatccactggcctcagcctcccaaagtgctggaattacaggcatgagccactgcgtccagcctaagctgagtctaaaaaggtgaatgccaggccaggcgcagtggctcatgcctgtaatcccagcactttgggaggctgaagccgctggatcacaaggtcaggagatcgagaccatcctgtctaacatggtgaaaccccgtctctactaaaaatacaaaaaattagccgggtgtggtggtgggtgcctgtagtcccagctacttgggaggctgaggcaggagaatggcgtgagcctgggaggcggagcttgcagtgagtcgagatcgcgtgactgcactccagcctgggcgacagagcgagattccgtctcaaaaaaaaaaaaaaaaggtgaatgccactttatctggtagaaaatgcaggatgggtcattccatgctgagtgactgacgtgtaaagactgaggcaatgaggtgtaaaatggtgtaggatgctggtgtgatggcagtttcttcagtggggttcgagacaggccataaggtgtagatctaatgtatttgtaaaggtatacaagatgttttctgctgcgtgaggagattgaacttcaatttgtaggactgagagactgaagaattttgatgagggacagaaattgatcagtgtgggaaaggtggagagactgaagacaaaggtattaattataatggaagctgttataatagcctgggagatgatggtaagggcctgacctaaatcgttacagtgggatttagaaggttctcctgtttaggtctgagagataggaagaaggaccaatttcacgctaaggaaagaagggtcagacagaaggaatgatgatgaactccaaggtttgtgctatgcaaactgggggcacggccacaccatccattgttaagagaaacagtagagattttaagaggaagaaaatgagttcgttttggacatgtttaatttgaggttacagtgaaacagatcggaagtatggatcttggacttggctctgatagttgaaacattttatttctctctctcagtggcttaagacttctactttctgtgagggaggggtccaaggaagggagcggggttgaactccttcccctcttcctccgcccaagtaacggtggatcatcacgcacatgcacatgcacctgaagcgctctatgtcccgtcctcctcccatgctttcttagcagcagggagtggttgcccaaagacaggagcttgttggagactccccttttatctgcgacttccagttattctgtcatgtcgttccatcctcggacttgaaaatttgtaaaaattttagctattttcatcttgcctgcttttatggtagctgcttcttcctcccatgttctaccaaaggtgaaatagttcagatactgtctgttcttagaagggtttgacagttcttcggtatttggtttacgtggttgccttctaggaaatgctaaagaaaagtcattatttgggctgtgtgtggtggtttatgcctgtaatcccagcactttgggaggccaaggcaggaggattgcttgagcccaggagtttgagaccagcctggacaacatagtgagaccttgtctttacaaaaaaaaaaaagagagagaaaataaccaggcacagtggtgtgcccctatattcccaattacttggaaggccgaggtgggaggatcacttgagcctgggagatcaaggctgcaatgagccgtgattgcaccactgcactccagtctgggcaacagagcaatactgtctctaatgataataataataataataatagtattaataataataaaagggggggaaagcctcttatggctttctgcaatctaagtgaaagcaatactccttctgtgaatgaatttttataattaagcactagcaattattttagaatatgatctgaaaggcctacttgtgtatagctgctggcaagtagagtatataaaaagtagtcccccagagatgtcgaggagacaaatacagatatcagtccttaaaagtccacagcacaatgagtgggatatgtatatacagagaaaaaaatatctagaagtaaacataccaaaacgtttcttatctttgggttgttgagttgtaggtgatttatttgttaaaaatatgcaacgtcttggccgggcgccatggctcacgcctgtaatcccagcactttgggaggccgaggcaggcggatcacgaggtcaggagatcgagaccatcttggctaacacggtgaaaccccatctctactaaaaaaatacaaaaaaattagccgggtgtggtagcaggcgcctgtagtcccagttactcgggaggctgaggcaggagaatggcgtgaatccgggaagcggagtttgcagtgagccgagatcgcgccactgcactccagcctgggcgacctgggcgacagagcgagactccgtctcaaaaaaataaataaataaaataaaataaatgcaacatctcaaacgataagcctatgtaacttttataattcaaccaccgtcatgtcataataagggaataattatatctgtagggtagaggaaaggaatgtacttgaaatttctctttataagagttaatttcaacttattctgttaacctgtcatgaaacagaatctcaatttcttttcctactggagatatgtctgtcctttacatcaccatttaatatcttgacaatgaagaaaattgtataacctagaaagggctgaatattactgagccctgggacctgggtcaatgatacttgtaatgtgactgtcttctaggaggggcttggcctaacttcttgtgcccactgatagaaggaatcagatctccctaatggcaactttccctttctgttagtgaactgggcactctaagagacgtatttattacttcagagcaggcttttgtatactgagaatgaagacaatttttctgtctccaaaatgcccaatatgatcctggtctaggtaaaaatcacttgctaactatgttctcatgtaagtagctcaagatccaatttcctgtaccccaggaagaatggtaatccaggactgataaccacatccttcaactagagaaactggattctgaagaagtactgtagatactaaaaatatgttgtggatgtgggcagttgttattaccagaattggctttaaggaacgttgaaaaataggcagaattcagcattattttattctccttttagtagcgttctctcaattttttaccattactcatgccttcttgagaatcaaatggaaaacttaccccctaggtctctttttgtccagacacttaggaaacctcctttctgttgatagttatattggccagatttgttagtcaactaatttgtggaatacactgatgacttgaagtggctaaattattatactgctcaggtatgttctgcaaagtaaagggaatatggctttgattaatggaataaaggtctaatggtagataagtttctgctggggcataggctatccccattatttcttatattaattcatcttttctttgattcaacaaatctttattgcacatcgtttatatactaggtattgttttcagcattgtgctttactttagatggaaaccctattcattggaccaccctagtcattgaacacgatgatcatcgtgaccctgttctgctcaaatcctccgatgtctttccatcatgatgagcgtgaattccagaggtggaatgatccggtcccatttacctctattatcttattttctatctctatccaaccttctccttctacttcagcctcactgacccctttgatgttctctagcacactaagcaagctcacactttggcattctaatatttcctgttatatctatatggaatattctttttacagacatccttggggcttactgcctaattttatgtaggactctgctcaaatgtcacctcaacagagaggtttctcttgatcactctctttccttgcttaattttcttcgtagtgatcaacacctggcatatcacacacacacacacacacacacacgcacacacacacacacacacacacacacgaatataagcttcataaactcaggtgttcctggccataatatacactcagtgaatatgtgtgtttgttgaatgactctgcttcccatggagcgtctacagtgtagtcttcttaatcttgagttcttatcttctccccagcacatgaccaagtaaacagacagaatatcattaccacaccaaaaataataattaaggagattcaatcatatgttccaagtgcttaacacagatactattagtattagatctacacattcctttcccaggaagggccctgttttcaggacatttggccgtcgtgactctggtatggctctgctgttatttttacatggtgttaatgtgttcctgacatatttcagagaccaggcttgtcatttactttgaggggtcccatgaatttctctcttacacttttcaaatgaaatttcagaattgaatcaaatttattgtttcaatcaaaatggatttgaattacagatgtctgatcccttaaaaacagagctaaaaaaagaaagcttccatcaacttcagttcttctttgcttgtctgctacaaaccagaaccaaggactttctatgagaccttaaaaatctttattatgttaaaaaacatcatgcatattaagctaaatgcattctatttgcttatattttaaggtttgtttcatcgaggaagtggtataacccgtgagcaggttgtggatgctttctcaaaatgtgattattgctcataaaagctgttttaattgaaaattttatgccatggaaagcctatagcaatcttagatgcacatacctatatttatatctatagtttatttttaaagattccctatacaacactattttgaaattactaaagggattttccttcctttttgttattcatctgggtaacttaaaaaaatattgctgttatgttcaactgttggcactgttgcaggcaactaaaagcttaagaaaattattccctcgcctgtccccccaaaagccacatctaaaaaggtcacgaaaggaaacacacaattcaaataatctccttgctgtatctgagattaacttgaacgcagatgttttaacttacagtttgatctggcgtaatatatacatttaacaaaatcctgttttgtattgcttctataaacactgacgtttgataaaagtgtattgatttttctgctatttaagagcttttgaaccagtgcttaaagcaggttttcttcaaggcctaaattaactctttcagcctttgactatggtttacatgtagggagttgtgtgtgcattaaaagtatgtgtttgtttatgctggaaatgcattcgaatggcaaaccattttgtggtctgcaatattttactcagtagggataatcattagactttgttcttgatttttttcttaggagtttaaatgattcaacactattcattaccgctcattttggaaccatgctgtaatcatcataggcctagatattatctgaaaagttactgaataggggatttcttctagcactctgggcatttcaatgtggacctcatccttcctcctctctatcctctggtcttttctccagccttaatgtgagggctctcaagaaagtgggaacatccatccagtttaagtctgtcttgctttcaaagttgttctcacactctcttctttgttggccaacattctaacatgtcacaagtttcttttcttactttgtgtgggagcacagagccacacaattgcaagtaggcttctctaagtaaaccgtgtcttcagactaggtaactcctggggaaaaatgtccaaatttaaaatagcaaaagaaatttcaaattgagcaacaccacaacctttgaagctacagaaggttgctgttatgtggaatctcttatgatggcatacaaagaaagactgtaacttatgtaagacactagcttacatgagggcttattagactttgtcattttcaaaagtcttcaaatgaatgattccatttgagtctcaatataacttgggtattttattagatatttccattttgcaaatgatgacatcatatctgagaaaggataagtggtagaggcaagaacctaagttctgcatttcttttcttttaccagccagaaagatcatgtctctctggacataacggagaagcaaaaaatttgattcagtggaaagttagtcaaacggctattttgtgatgctgtaccacatttcttaatttttaaattcatcattcaggtacatagtaagcataacctataaccctgataagaatatttctttatcagtgatacacacacacacatgcacacacacacacacccctcaagaacagggtcaaaaacagatggaaaactccaaactagaaacctataaggttttgtacaaaggactgttaccctaagatctttctcaaacaaaacttatagaaaatgaaaactgtttgagtgattgctataaaaaacagctttcagaagaatgtgctcctcagctcccagagattgcctctttcctgggacagagcttccaaatataaatgggcaccatagtcgtcgttggtggtgacatggcctgtggggagcatggccatgaagcatggcttgtccagacatcttgctggaaaatgacattgtaatgatgctatggctcttgggaaacccaggacatagctcaggtgaagttaatatttattattagaaagatgatggagatgctttacatatttttgaagagattttatttaatttacattttataaaagaaaaatagcttcctttagccaaaagcagttaataagttccttcgtgagaattaggagcaacattgaagctaagagagcagcctccctctaaaggacttgggtttgaatcctggctctgctatttcctagctgtgtgaccttggggaagttcattgtcctttttgagctttggttttctcatctgcaaagcataaataataacacctacctttaaggattgtttcaaaggttgtagataatacatgcgttggcccaaggtaactttttaaaaatgaggtactcaattcatgtgaggaatgggactttggatcattaagagcctcattgcacatatatgctgccaaggacttgtaagtcaattgcttgaaatatgaattaagggggatgagatataggggtcagggattttagatcttaagaagatgaatctaaatgtaggacgtaggtgatcctagggaaacactcaagtctctcctttccatccagtggttaccgaacccttggccaaggcactgctcccctgatcagtaatgtgtgaaatgtcatcctttcgctcagtatctcttcccatgtgtctttgagttatatctacccattttacccaccaaacttacttttattatcttcatcttgatagagccagcacatctccgcaggaactagctgaatctgattctgcttctcacatccctgacaaaactgtcagcttcatttccatcacaaaatcttggtagctcttaagggtgtcagagctcgatgtttcccattccaggttgaattggcacagctggggcaaagaggcacttccttaagacttgtgaagtgagcaacttggactgacagatcattgagaaaatacaaatgtgggtttacatttctactgtaaaataggaattgtctcaatatggaaggattataaaaaaaaaactttgacttaactcattgatagttgagagttacaatataaaaagcaattagactgtcttttccctttgacctgtggtctattctgatgataatcattgcattaaaaaccttttaatcatgttaagccttcgattctgacctaaatgataaagttgatttttttaacttaactgattggaaaaattgttaggcaaaaatttatgcgattattctttcaccaatcatgaagtgtggtatccaaagttgatgatatgtagcttgctaccataaaaaggaaggctgcattagccacattgttataaaatcttgctttcaaagaaaagaaaatgagggtttcaagagaaattactatgttagggaagtagctcagtggtgattgcattatattttcaaaataagaacttttttagttacctgaagttgctactccgttttaagacagacttattttaaacatttttggtggacatattataagcatttttctctttgcttgttagtgagaacatactaaagattaattttcctggaggacacagggttaacatattttttcatttatttattgaactaatatttgctgagtgcccatgcactatcagttactgtataaagggagtcttaaagagagaaggcccagccatgttgagaatggggagaatggagttcccagcagggagaacagcatgagctgtccctgaggtgggaaagcacttggcaagttttgcagaactgaagaacagcgtggttagagcttaatgtgagacaaggagaatggaacaagaagagactggaatgcagttaaatgtggagggactgttaatgtgcatggagcaattgcccttaagttaaacatcaccaggctgctgcacattttctgatatttgatgtatttattttgtgatgtttctgatgtcttttccccagctgcttccttcattgttgttaattctttgactttgcagcaattgtaaaatctaagtctagtggtgtttcctttatttctttctaaaagtcttctgttgggctggagaatcagataaccagcctaattaggattatgtctaaactaagagtaaaacagcgatgagtttgcaacaggtacactcccctctgggcaaaagctttaggctctttttttttttttttttttttttttttcagttggagctttgctctgttgcccaggctggagtggagtggcatgatgttggcttactgcaacctccgcctcctggattcaagcgattctcctgcctcagcctcccgagtagctgagattacaggcacctgccacagtgctataaaagctgtaggcttttataaatgtaccactttctttctgggcctcagtttccttatctgtaaaagcaggttactgatcaaaataccacataaaggccgtttcagtttgtaatttgacttacaataaaagatctttaaaacatattgcattgtattatgctttgcatagctaagcttgcccttgccacattttaattatctgcaagcattaactgctttttaaaataacagcatccccaaagcattaatattgatgaaaataaagtaaaaaattaaagttttgagaattactgtataaatgaaattaatatttgattatagatcacttattctgttacttttttctttgactatgaaatttattgtgagaaagtgtgaactcaagtgcaaattaattttgagttccatgtctaatcatttctaaatttggtaaatgcatgtcattattttcctatttcaaaattttaaattctatactttctgtatacaggagggttacaattgttcatgcacacacaaatatctcttaagggagaagctgttgcttctgttttcatgtcagctacagcatttgacatagtattttgaacaaaataaatgctcaagaaaatgttttttgcatgaacacatcaatgaaaaaaaattcattggcttgaatctgacttaaatatttgctaaatggatcaagcaccaccaccaagctacttttctgtcttcagaaaagcttttatcaggcaccagttgcttaaaactaaagtgtgaatctgtggtattcttaaattctttgggattatgtaggaatgtgtaaaatgatgttcaagtgtctcaggagaaaagggttagtaagcaacacttacatagaaatgaaattgtttcagacagtggtcaacctcagcaaagtatttgcaaaatagcaatcaagtgactgctctcatttgctttgggggtcagaagctgtccacttacctccaaacctcactcctcactaattgcagggatggacgagtggaaggcagggtgttggatgagtgctgacagctgtcccgaatgtggcatcttgtttcctacgggcccaggtctgcttagcattacacagtgcttagcttcgttcaggatgtggtcagtgtttgctgggaggcgtatgagacactggctttccaggaggaaagctcctggaaatttacaccaggcatgcaaatttgagtgtagaaaattgactgtaaaaattcaggggggaaaaagaaaatttgttggtgtggcagcaaggaaaatatttcttttgcctccccaaagaaaaagaaattccgcagggcttagagtttgtatttgaaaagagataaattcattcctagaaatattttggtatcactggctctcaggtggctcgtgttccattcattggtggtcagagctttctgggatctaaggaaggagaggtgaggagttggaggggaggatcttacatgtaaggggagcacgtgcggtgtgatataacaatccctgagccccccagcaagtagtgaaaattatgtattagattaatctgtgtctaactttaatggggattatcttcagtttaaaaagcaaaggtagaaagaagcgtttggggtaaatccttcacgcctctggaataaatttatgattttaatctcatattatcctaatgtttaaagtattaactttttcttaggaataagcagctaaattgatggtacctcgggtcgctgctggctttcaatttcagggatgctgtgatgaacgaagaatgaggggtgtgtccgataaaaacttgggcctatctccttatttccaaatcaaatggtgtcattggtagcatccattgtggcatcaaacttctgtgaaagaagagaagacaggatatacacgcggaggcatgtgattcatcttgacgtcatctgtcctctgcgttatttggagagtgggctgagaaaccccgggactgaagacatagggtagagtaacaaaaatgcaccccccacaatgtctaaacacaaatgttcactttttgtttaagtgaacttgagctgtgacctctcaaaactgcttactcagcctttcttaataccagagcaacttaaaaacgaatcccatcttctaccaaaactgctttaggaagcagctcctctgggcccctggctttgacaggattcattctgaaatggtcctgtatcatccaaccaatacagcaaatctgttacttttagaacagaagaatccgacaggattttccagaggccagctgtggatctttagattgtcgtcatgttactcagaacagaacaactgtttgaatcaaagccaaagatgtccttgaatcatttagtatcagggcactaatgagctctgcagacatttcaaattccttttccttcccatccctccctccccatccaccttacccaggtgtgacttaatccagtctatttttcccctaagtaataagctgtaacacacatacgctcatgcacatacacacatccatacatacatatagacataagatttataggtgtataatctgttttgtatggtgaagtgaggtttcaaaacagtgatttttcaaaagcagcagcagattcttcactggtctcttttaattaatagatatgtagaagtagagctttgattttcattgtgtcctacggttttgagaaatggcagatgccttaatgatctgctaagccaactctgagtttttggagatgagaaaactgaggctcagagtttgaggagatttgtccaagatcccccaggtagcatctggtagagctggacttgagcaggttgttgacttcctggctctctttcctctatagcacacaatttgagagccttattcatgtttcttactttctccattttcttctgcttaaaactgcctgttttaaatgggcaagttttattcacctatgatgtttctttttcttgtttttcatggcaaattgatgaaactgtgttattctgaagtcatatgttatatgagcacacataatgtcagtctggtatgctcactgttccctgccccctaccccactacatctgtgtgacgaattccgcttataaccagggctcaagtcctctgtgagtctctgtgcaaagcaaaactttccctggatactcacctcccctcactcttggcagctgctcctctctctactccagcaagcctttgtatatggaagcatgagcattcctacattctattgtatttatttattcattcacttatctcttttttatccccagttctccaatatagcaaatgaaactccttataaaacaaacccctacataacttaagactgttttaacctttatttccaatttcatttctgaagatatattatgtcatcctgaaggtgggcctgttagttttgttgttgtttgttttgttgttgttgttgtttgagccagggtcttgctctgttgcccaggctggagtgcagtggtgtgatcttggctcactgcaaactgtgcctccccagttcaagagattctcttgcctcagcctctcgagtagctgggattgcaagcacacgccaccacacgctgctaatttctgtatttttagtagagacagggtttcaccatgttagccaggctggtctcgacctcgtgacctcaggcgatccgcctgccttgacctcccaaagtattgggattacaggcgtgagccaccgtgcccggctgggcctgttagtttaatcttccaaaagattatgaatcagcttcctactttttaaccgatatttattgagcatcaagtactatgttacaaataaccgtaggacttgcttctgtggacatcatgccacgaaatcttcacaacaatcctggagagttaggttggcctaactgatgtatagatacagaaacagcagaaagagggcacatcttttctaaagtctgctgagtggctaaatctgagattcaaactcaaccatttgaaccagtgtttaagatctccacccctccatcgcactgcctctgcatccctccttaactcattaagcagatttttttcagtatgcctatacttcaacaagatagaagcaggatggtgggcaggagggtggcgggggtgggggtggagatgggtgaagttttggagtaaattcttcggatcgtctgcctcaaacatacccctccaaaagtcatcactaccaatatgaaagtttaaagtgttatactttttaaagaagaggacttaggccccttcagctctctgttattgttgccttatcttctgtttatcacttctctgatttaatttcttaccaacgttatttaaaaaacaacaacaacaacaacaaaaaactaaccaccgaaagatagttcctaattatcccaggatagtgacgtagggatggcatattcaaattactacttgattcaaaatatggaagaagttgatgcctagtagcttcctcccaccaaatttttgtcagaacttctatttaacagcaaacatatgttgcatctacttccccccaccccacatcttttaatctcagaagtcctattggttcattaagtggcagtatttaaatgggaaaaaaaaaaaagctaaaaatgtcttaggtttccatcacttgtacctgaagagttaagagttatctgaggctgggtgtggtggctcatgcctgtaatcccagcactttgggaggctgaggcgggtgaatcacctgaggtcaggagttcgagaccagcctggccaacatagtgaaaccctgtctctactcaaaatacagaattagccgggtgtggtggcacatgcctgtaatcccagctactcaacaggctgaggcaggagaattgcttgaaccaggagggggaggttgcagtgagccgagattgtgccactgcactccagcctgagtgacagagtgagacactgtctcaaaaaaaaaaaaaaaaaagaaaaagaaagagttgtatgtaactgtgtaatgtttctcccatgttgtaaaaactagacagtatcactgagttgcgactgtcagtcctttataattcaccgttgctcatgtttgcatctatcagttagtactgaaaagtaaaaggcaggccctttcatttacataaaataaaaaataagacgcatgaaactttttagctttttgaataacttagctctagtggcagagcaggaatgtgtttaaaagaattaaaagtgatgagaagtgtttatctgttgatagaacagcagcagcctgaagattgaccctgcctgcagctttgaactgtttgattactatttgtcttctcccctgcagctatcaaacaagggaagcaggttttgaaggggcaacagtgaaagaagaaagggaaaaaggtctgccctcaccagaggaaaatgtttcttccatatggtttgcttagaagctattttgtctcaccaaaaggataaaaagtctctcccatgcgttgagagcagggaacatgtgagtcagggaaatcgagggctcttggagacctaagtgttactgcagacttacgcatgtgaaagttagtacaagggcatagggcatggctgttcacaatttagctactggtcagtgttgtccatctggtaaacccgaccagaggcaagagttgccgggattgtctttgatttgtataggcaacagcttggctgagttttattagagccattgttttcaaatatttttcttatcatctgaactctttcatcaaataaaatatcaatatatgaaacagagagtagcagagttgctctggttgtagtaggggagaaggcctggtccctgcctcctatgctttcaccttccctctaatagcagatgctcaagcatcagatttcccccaggaaataactcagaaaccaaacaaggaaaggtgattggtgagatcccttatcatcctattgtcctggggccaaggagagtgatgcttacaccagtggttcttaaagtgtagcccagactggaagcatcaggattacctggaaacttgttagacatacaaattcagaatccagatctcttaggtggagcccagcaactgtgttttaataagacctgtatgtcaagaccaccagggtttgagaaccattactagagcagcatttccgattttaagctttctcagattcattgcgtagctggatcctcagagaggcaggtaccacttgcaaggatgttaatacaggaagcacctgtaagagaaaatgagacaggagctggaaaagactgagagctgctaaaactcatgcatgtctactctgagtggaggagagagggaaggaagattgggtggaagcatcccaagacattagttctaatatctgggtatcttgtaattggtctccattatttgtcatttctcttgcaaatctcgtattttcctggattttttttttttatggcatgttgggggcagttgagtaaattcagtaaatgttttctagtcatgaatgatctcttgtagagactctgtattttgatatactcccctgaatagtgctgtttttaaaaaatagtcacttaattttgctgaactcaaactgtaaactctctatctcacacctcaaatcttgggttagttctcattagctttagctgtcagtgctatatgcacatcacaggggtcagccacagttggaacaaagtttatagactctgcattttgggctccctcctttctggaatttccccttcgctttccagtatactttttttttaaactgtaagtggttttcttttggcatcatattatcaaggtactctattctaaggagtttcacagcagtttgagccttaagctgatttcttttgcttttgattgtttaaaaactataaacatttgttttattgcttgagcaaaatatgcctttctactggcttatacattcataaaatcaagactttaatattcatcctgtttagacattatcaacatatatttcctgatgagtcaattgatttattcattaattcttcaaaccattgcccccttctctgtctacactgtagacatagatttctccattactctaacacattggttctcaaaccttagtttacatcaaaatcatgtagaggggctgtaataacacagattgcggggcctcaccccagcgtttctgatgccgtaggaccattctttgagaatgacttgtctaaccctggtgacaaattatcatttgccagagacagccccagtttttgcactgaaatttccatgtccctgaaaatcccttagtcctgggaaaaccaggaagactggtcactttgtctaacacacttggcagtacattgaaaactcctgagtacttttcgaaaatactgttgcttcccactcctcactcttcttggccccacctccaccccttgccttctatttaatgggtttggggtgtggtatgggtatctggatgtttaaaagctgtctaggtgattacaattagaggtttgtcaaccactgctctaatcacaagcctcacccctcattggaagagtttggtactagctattccttcacctggaacatttttcctcttcagtggttctgtcctgattattagcatcagctggggaacatttagaaaataccaatgctcaggccccacctcccaaacccagcaaaatgagtctctgagaatatagccaaggcattggtagtcttcaactcaggcgattctcttaggcactcaagaatgggaagtcttgtgatcttctcatagctagctccagtcatgcaataaaaaagacctatcattcctatccatgccatttaaattcacccccacctgctttccctgatacttgtcagtttctgatattttctttttcatttaattctgtttattttttcctttcccaaatagaatgtgaactccatgaaagcaagagctttgtcttatttatcacagtattaccagttctcagaagtgtctagaacatgtaagcacccaataaatgttaattcatgcctgcaatgtattgagtaccgtgcttggctccagggacagtacaataatgaacaacaacaataatgacaacaacagacaaaatagtaatcctttctgacctcatagagcttgctgtctagtggactacttctttttttttttaaataactttttgtgatctgccattagaacctcagaaaagtaaatggtgaaatcaatcgaggggacacatttcaccacttgaagaccgccactgacacctcaccttttcatgcagttaccagcatcatgtttccatggttaaatgaacttagtgatctatagaaactgaagtaacatttcaaccctgccttatgacaacctgagccatggtttctgggctttgtgaatttcttctgttttcactggcaacttggggccattgaaaagctgggagacaatgcagctttcacccccacacgtcaggcccacgatggaatccccctggtggtccaaggacagagctgagtcttcctgctgtggttgggttgcaggaaatactctgcagtctttcatttcagccagacagacacatgaaaggacccaggaacacagagaaaacatgtaaacaagtcacatctatttttatggaaacagacataaatggtgtgggggtgtcgtagcacgtgggtgtctagattccagagggctttagtcaggagacagtgtaatgctcaaagcagaaatttaaatgaaggaggaactttgttggacaggtcaggactggagcatttcaggccacgtgaatgacattgcagagtcttgaggaccttagctgacatacccaatgtgaggccaaagcacataatccctgtactgttcttaaggagtcccacctggagcagagtaggatggtttagggattaggtagagtcagcatttcttcctcttgcctttcctcctgaaataattcacctatcaggtcaggtttattctaagattaaagagataactgtaaagtaacttatccagtgatatgaaacaatctgcattgccaaatagacactgtgaggaaagaaaccttaacttttgcctagatatctagttttattatgtctctaatgattaagtcactggaaatgtttcatctagagctttgtttttgcaatgcaaaattataaagagaaatccattacgtgagtgaaacatgagcgtgaacaaggtatatttttcaacatacaatacacagaatatgcacatagtatataatactgtgtgtatatagtacatatatatcatacatacatttatctatctcttgatcaattagtctatctctttcatatgaaatgatagtttgctgaaaggtagagaccattctataatacttagaaaatatatttaaaatatgtcctattagcatttaaactatttgtgttattcgtgaaggaggtttaagaacagtgctagaagacttgtagcttgcttaggtataacatctacctagctgtattgtcttttgaattgctttcattttatcacacatatttaacattgcatctcccaaaacccaggccatcctgtgaaaagtcaaaccataacttcagaatatcccaggtggtgtatttggccttgcctcagtaagaaattagaccatcatgacttcacaaagcagaggcattgtggtgggtaaaaagaaaggcacaggacatttcttgattaatatgtgcagtcatgtgccatgtatgatgttttggtcaatgacagaccacatggacggtggttctatgagattacaactaagtttttactgtacttttttatgtttagatacacaaataccattttgttacaattgcctaccgtattcagtacagtgacatgtataggtttgtagcctaagaacaggctataccatatagcctaggtgtatagtaggctatgtcatctattaatagatttgtgtaagtgcagtctatgatgtttgcaaaatgatgaaatgcctaacaacgcatttttcagaaagaattcctgttgttaagcaacacatgactgtaattgtagattagtgtgaagatgcactagcaagacattatgacactgtattttacttcattaagcagtaaaaatccctgttgtgtgcttcgctgtttatttaatcattaattcgatacatatttattgagtgtgtattatgtaccaggtactgtgataggcactgggtataatggttaaaataaaatttaagaaaaacagtttacaattaacttgtggaggtaggaaattaaaaactctataattgcaggtatggttatacaagaatgaaaatggtactatgagacactgatgtgaggaacataatttagatgaggaaatatgacacctaagtgacatgtaagccaggaggtagttagccagctaaggagtactttccatttcagggtttccagaaaatctgcaaacttgacataccttgatttactttcaaaactaaaggcagaagaggtacagtaacttgttgttctagtttttattgttttcttggggaaagatgtggaaattaatttttccctaaaatacattaatcatgaaggaagccacatggcgtaattgtggagggttactttatttttctttcaagattgtgattttgtcatgcatatttaacaccttatcttccaaatgatgtgtgtatatttttcccctgatatctatcaaagaccatttgcagaggaaataaaaaataggaacacccataggctagaatatttaaataatttctgcaagatgtagtacaaatagtgcctaatttatggaggctctgctcattttgccatttacagccgggaaagaaaagtccacctggaaagtgaccagagagaatctcgaggagtccaagtcacttctttatttgtaaaaactggcctaagaaattaaatagaagagactattgggcacagaaataaatgtccctgctcctgcatgactaatctgaggaaataaaacagagaaaggaaacataaaataaaacaaggaaggaaatatataatctttcttctttccactttggtactgaaagtattgaacagggacatgcacaatctcacccagaacttactgtaaattacagttctggacaaacagacatcgctctctataacaataataaggaaaagtcaccgagagagattactttcagaaacaataaagaaatacaaaaccattccattttctataaggtcatcacagattacaagctaaaatagagtctgaatgtggagtccatccccttcaaaatggtgttacttgcagtacggtgaagtgcatattttgttggtataatctgtacgtgatttcctaactgagggcatattaacaaattgtgtactggttttagtgtctctcaacaatgagatatttgaattccattattatttcacaggcagaactgaaatgagtcaatattttgccactacactattataattgaggcacagggtcttgagttgaatatttttcattaataaaagtcccataaacataattcataatttgggtatttgataatcttctatttgtagacactatttttacctgtactgaaggtaagcttgtggcccaaacttggaaatggagttcctttcttcgtatgctggagcagaagtcctcctcatcctctgttaattgcagcttcaaacatcctcatcattaggttgctggtgcagagcaagtgctctggcgtcgataacttcagctttctctaatgactttgcttcaacttcctcatctatacattaaggaaactcttcgtagcttcctcattgggtgggcccttaactccatggccgtcacagagcacatagtcagtatatattagctctgtatccaaaaagtttagaaaagtggtttaataatgtcaatacagggcattttctataatagtaatgctggtattattagtatatcctaaatattgtcatttattttcataagcaattttggatcagttgtgttttatgtataagtaaacatttcttaaaaattaaatcagcgtaatagcaaaaactgactgtgaaaatacagaacacaaaaactagcagctcaataatttgccttgcaacacagtacccttaaataacaactagctggtattggaagctagttgatttcattttgaaatcaacaaatgaattgaatggggtggtacatccgtaaaggaaaatatactttaaagtatttaaactcaagtaaagagcaaaggtgagaaaacagcctttgaaatcctgtcataaggcaatataaaagtcagaatcttcattgttaatttcaagtgattgaagttttttcttgagtatagagggagatagatttttcaattttttttttcaattttagaaactcttctttcctgtatggattgatctttccttggcttttctaatgaatacttttagtgttatacctttatcctaaagtgatcattgaaaatcacatatcctttccgttggtagtttaaatatgtcttccctggaattgtatgatgatatttagtgtcattgagtcaattattttaccttcacatccagacaattacatttaaaatgaattcttaaacattcagaattgaaaagaaggtttccacattaaaccaatggctcttttggcatctactacatgccttaatttttaccacatatgcataaattggcaaagtatcttatgggttataataatcctgatggcttggaattaatatattgccatcatagagcaagtcctgagcccatctactctgaatctttggataaagacaaaactccatcctgccatgcacctggtcagttgtgcaatgctgaccaatacacagctgctaacaataagggtattgtgcttatgtaacccagttcaggatctgatggttagtctctcgatacatgctgaaacacgagggaatttttacttgccaggatgcctgcttcatggaaaatattgtgtctatgttgaagcatacacttacatctctctatataagttggtggagttgaattctaccagattaccttagctttccaagtcagttcagggttaaggctctctcagtcaagaaaaggtcatacagtgtggcgtcgaatgtaattttaggaattgttttttgagcacttgttttatcaagttaacaaaagtctgtattatgtttcttctcattgatgtgggtgtgtccttgtgtgtgtattattcgagagaggcttccatttgttgagtgatcttcatgcaaacatcttggagtgctttacaaaagaattttaaaaatcaaaccaaacaggatatgaaactgtgctgccaaacaagtaagtctttaggcatgatttaaatttagttaatgacataaagagctaaatctgtgaaaggaagaaagttccttggatcagaaaaaaagcagaaaacagatactcatattttgtctaagtcttcatttgagtagctccaaaaatgttcttttagaagtgaagttggaaaatcccaggctaagtgaactccaaggagcagtgttttaggggaaaagaccagataatagttcccatgtgcatagtgatctacagattgcaaagtgttttcccagccattatctcatttgaccatcacaacactccatcaaagtaattaaggacagtgttaccccagtttacagatgaataaactgatgacaggagaaactaaggaattaaatgaggtgatagagctagatggtgatagagctgggattggcatatggatattgttccaaatcccatgttgtatatacagtaacataaggctccactgtggcgaactatttacactggatacttttctcctgccattatagctgccttgggagtgatagtaatgactctgacttcccagggtatcttaacattctgcttcctctcaggaggatctcctgacattcttgtgtaaatggaaaagtagaaaaccaggatcttctaaggcaagtgcattgtaaatgataatttcatgccttaatcttttcaaaacatttaaactggctttgatgattcacctttaaactcacccttcaatagttctcagaatcctccttgagaagatgaaattggaatgatcccatcagctctggcagttgtaggtggattctaatggtaagggactgtagtggggaaaatggggaattcttaatgagctccctttctattgctgacttgaaccaaatgtagttatccttgaacgtttgaggattctataagcattgtggtttcagacagtgagtcataaccttgtgccagaggggtgggtgatatagtatctggattgattcatgagacatatagtggctttttaaggtatattctgaaatgagtcttccagcagtcaggtttcgttgttgtcgtctttgttttgccttcttctctgaaaacacaattattttctcattcaaggtttggactttaaaagcttactttttccttgagacacctttagcttgagacaaatctaggaagaacatcgttttgtgattctgtagatcttttgacaaagtggatcctcctgcttcagcctccctgacaattactttattttttgtagaggcgagatcttgatatgtttccctggctggtgttgaactcttaggctcaacccatcttaccccacttggcctcctaaagtgttgggatttcaggcgtgagccaccacacatgcctctaaacttttttgttttgttttttgagacgggatctcactctggcaccccggctagagtgtattggtgtgattatatctcactgtggtcccgacctcccaggttctggtgattctcttacctcagcctctcaagtacctgggattacaggtgtgcaccaccacacctggctgatttttgtattttttgtagagatgagggttttgtcacgttgcccaggctggtcttgaactcctgggctcaagcaatccatctgtcttggcctccaatgtgctagggttacaggtgagagccactgtgcctggccaacttctaaatttcaatgacttattattttttttcttttacctgccagaccttggtaatcatttcttcttttaaatttttttaatataattgtccaggtggttcaagatcccctaaaagatgctgtatcattgcttaaggtagaatgtcttgcacagaataggagctcagtcgatgtctgctaattattagtttttcctgttctatatagaattatatagttttaagtgttaggcaatgtttttaacttagaacttaaaatggaaatcactatgatgattaaaatattctatatcctcattgcccaatatggcagccactagccgttttgcttgagcacttgaagtgtggcttctgtgactgaggaactggatttaaattttatttaactgtaattaatttaaatgtataaagccacatgtaagtagtggctgccagactggatgatgcatgctctaagaatgtgcagaatggcaatctaaatgtgaactgtgagttagagaagtcctcctggaggaagaggaacttgggtcttgcagaagggaagcagagagaaggggtgaggtgttttaagtaaggaatatagtaaaagctctgaggtgattgacagtgttaaatttgggattagtttcaagactggaagtagagcagagtttgagcactagggacagtagtaataataacagcagacacttaccaatttacaggccacatactagtttaatcttcacaacaatactctaactcgaagaatataagtaatttgctcaaaggtacaagttgatattggacctgagattggaactcatatctgtctagctcaaaaacctaagcttttaaccacaatactgtgctgccttatgatctgccatgtttagaaagacttacaagtaggaaatagcctaaatgtcttttaactggtaaatgagtaaacaaataatggaatacatccaatcaatggaataccacttacaaatttgaaaagtaacagaactacagatatatgtaacaacatggatgaatcacaaatgtattatgctaagtgaaagaagccagaggtgaagagctatatactgtatattccatttgtatgacgttctagaaatggcaaaattatagagacagaaaacaggctcaggagttgccaggagctggcagtgaaaggcagggattaactataaagagacacaacagattttttgggggacatgatgaaaatagtgtgtatcttgatggtagtagtggttacatgactatacatttgtcaaaactcagagaactgtgaacaaaaaggggtgaattttactgtatataaattgcacatcagtaaagttgaatgataaacaaagacagacttacaagtagatccaagtttattttctcaatatgttaagttattgtaaccaggctattttgaaaaataaataattctaaaattcttgtgtctaaacatgtcttcatatttatgatagatatataaatatatacaacacatataatagaaaaatgatgtagaaattaaaaattcataaaagtgatgtgtgtgtgtacctaaagcagttaaatttgcatttaacatgagttgacacattaaatgtttattcaatttagtgtttatttgtcattgccatggcaaagcagttggaggtgaaagaggaagtgatgttttaattaacatgattggtaagatgtcatatgacttatcccattttccttttattgtgtttaaatgaaaatagctaccatatgaaatcatcaatccttttaaagcttgctttaaaatttttcaatacataatggaattttcattttcactcatatttcacttatataaatcacttgtatgagacaacagtaaaatggatatcttttaaacagatatatttatatcctccttttatatttctttttcttctttctttctgttttttttttttttttccagacagagtctcactctgccgcctaaactggagtgcagtggtgcaatcacagctcatggcaacctccgcctcccaggctcaggcgattctcctgcctcagccttctgagtagctggaattacaggcgtgtgccaccatgcccggctaatttttgtatttttagtagagacagggtttcaccaattggccaggctggtctcaaactcctgacctcaagtgatctgcccgcctcggcctcccaaagtgctgagattacaggtgtgagtcactgcgcccagccctccttttgtatttctaagaaaattctctttttttttttttaattatacttttaagttttagggtacatgtgcacattgtgcaggttagttacatatgtatacatgtgccatgctggtgcgctgcatgcgaaataaacttcctgaaggtcttatatcactctgtgttcactagttttgttatgtattcataaaactatagattagtataatttttaggcagagaggacctcaaagtattaactctcctggtccattatctacaggaggtaaggggttatctgtgttttataattgaagaggtgacatacagaattctaactttcccatggtcacatttctaacgattagagttttaggtttcaagagtgattaatcttaataaagaactataaacaatattaattaatgattatgatttaagcatttcatttgattctttgctttaagcatttctctaggttcaaggtttaataccatcatatttaataatactgcaataatcctggttaatcttaaaatagtgtcactagggaacatgtaaattacaggatatgttattctttgaatgaatttcatctactattgtggaatttgaggtaatgaatctgaaaacagtttgaaggctataaagcacttaacaaatgttatttttttcttctttgtttttatctgtcatttgcttgccattttccttagaatctggagtaatatgcatacatttgcagagaaaactcatatctgatatttttgcttgctaggaaataattctgttttgtacaaataaatatataattatacatcaacatgtagcacattttcaaagtatgatctaattaaaataatctaaataaaattttttctaaactgatacaaaaccagtaattggtgtcatagcagcttgtcactctgtttagtaatcttgtagtattgtttaaatatgtacatatatgtgtgtgtgtgtgtgtgcttgtgtgtgtatccttaagactgtgagccaagacaatattttcttatgtacctcctttttcttcttataattccactttaaaatattatctttatctattttctgctactttaacaatgcatgagactgggtaatttataaagaacagaaatttattctctcagagtctggaggctgagaagtcaaagattaaggcaccagcatcttagggccagtttctctgcttccaagatgctgccttgatcagccttccaagatgctccctgccattctagagggtaggaatgccaagtcctcacatggtaaaggaccagaagagagcaaacggattccagaagccctttttatagtggctttaatccattaatgaaggcagagccctcaatatgtaaacacatcccattaggccccacctcccaatgttgttgcattggtgattaaattaaatttccagcacattaattttggggaacacattcaggccataacagatatatagggagagcaaaagtagacataagtaaggccagataatttactcttaattgtgttatagtaatgttaatatctccataaatatatttcttaagttagtgaaaacttaaaccaaataacaaaatggtaaatttgttaatgttacatgcattttagatcctctaatgtatttcaggcattttggatatattcttttgatctttgctcatttctaactacaaggaatgcctcatttcattgtacttcacttaattacagtgtgcagatattgcttttttaacacattgaagttttgtggcagccttgtgttgagcaaatctactggtgccaatgtttgaacatatgctcactttgtgtctctgtgtcacgttttggtatttctcccaatatttcaaactttgtcatcattagtatatctgttatggtgatttgtgtttagtgatttttgatgttactgtagtaattattctgaggcactatgaactgcactcctagaagatgccgaacttaataaatatgtgttctgacagctctagtgatcagctgttccccatctctctccctctcattgggccttcctatttcctgaaagacgataatattaatatttggttaattaataaccctatattggccttgaagtgttcaagtgaaaggaatagccacacatttttcattttaaatcaaaagctagaaatgattgagcttagtgaacaaagcatgtagaaagccagtatgggccaaaacataggccttttatgccaaacagccaaattgtgaatgtaaaggaaggaagtaaaggaaagaagccatcttcataacataaaagtgcaaaatgaagtagcaggtgctgatgtagaagctgcagcaagttatccagaagatctagctaagataattgatgaaggtagctacactaaacaacagattattacggtattcaaagtagccttctgttggaagaagatatcatctggactgtcaaagctagagagaagtcagttcctggcttcaaagctcaaaggacaggctgactcctttgtcggggctaatgtagctggttactttaaggtggagccaatgctccttgacaattctgcaaatcttagggcccttaggaattatgtcaaatctaccttgcctgtgctccgtacatggaacaacaaagcctggattacactgcgtctgtttacagcatggtttactgaatattttaagaccactgtcgagacctagtgctcagaaaaaaaaattattttaaaatattatttctcattgacaatgtacctcattacccaagagcgctgatggagatgtgtagggaaattaatattgctttcatgcctactgacacagcatccattgtgcagcccatggatcaaggagcaatttttatacatttcataaggttgtggctgccataaatagtgattcctccgatggatctgggcaaaagaaattaaaaaccttctggaaaggattcaccattctatatgccattaagaacattcgtgattcataggaggaggttgaaataccaatattaatcagggtttggaataatttgataccagcatgcatggatgactttgaggggctcaagacctcagtagaggaagtaactgcagatgtggtggaaataacagaggattaaaattagaagtggagcctgaagatgtcactgaatttctgcaatcttatggtcaaacgtgaatggatgagaagttgcttcttatggatgagcaaagaaagcaatttattgagatggaatctattcctggtgaagatcctgtgaacattactgaatcgacagcaaaggatttaaaatatttcataaatttagttaatagagcagtggcaaaatttgagggaattgatgccaattttgaaaattctactgtgggtaaaatgctatcaaatagtatcgcatgtaacagagaaatcttttgtgaaaggaagagtcaatcaatgcagtaaacttcattgttctcttatttgaggaaattgccacagccactccaattttcagcagccaccgctttgatcagtcagcagccatcaacatcaaggcaagaccctccaccagtaaaaaggttatgatgtgctgatggaacagatgattgttagcattttttagcaataaaatatttttaaattaagatgtattttttagacgtaatgctattgcacacttaataatgttcaatatagtgtaaacataactattatatgcactggaaaccacaaaattcatgtgacttattttattttgatattcactttattacaatacttgctttattgtgatatttgctttttttgcaatggtctgagccaaacttgtaatatctccaaggtatgcctatatttcttggcacaaaatatagaaaaactttgcaaaaagacagaatttttttactgtagaaagtgtcaaatttacattagaagacaaatgtatggtaatattaaacaacaggtttaaatatgagttgaaatgttggcttagattctctctaagatcactttcaccctcaggaattgctaatcatcataattatgggccgtccaatttagctattgttaactgaggtcccataggatagggatgaggtcccattgtctctcttattattttgtggcagagattcaaataaaataatggtgactgctgctcctggatttgcagaccataagatgaggcatccttagagcactggttgtttgtctggaagagacatccatcctctccggttgactgtctgggtctgcacgccctgagcagagggattgtgggtagagagcatgcagggaagggctagaggaatgatgaaggtgaataaaggaggttggaaacttcgtatactataaattgcaagattgctaatctagggacatgcatatggaatggaggactgtgtgatatttggagaatgtgtagtaaacttagaagtaaagtagtgccaggggctttctgatttgtttttagattccgtatttgggttctgctgaggaggtgcttaccctgagccaggcaacattttgaatatggttttgactgagatattttgatgtgtaccaaaacaaaaaaagaggtagtagcaagtctatgttttgttttgtttccccatgatcaaggaggtaaagagagatcttcatcccattgctgtttcccatctctaggtcttgggtatggtccctagaggtcagggatatcagttgtacacatttatcagtgataaatagtaatttttacattttgacactttgcatcaaaaggctgtctaaagaactaagtgaaatatcctgtttagaattaagggcacaagtaagtgccaggtgatcgaaccagaccagggcctaggagaaaagcatagctttgggtcagattctgagcggctggtaggacacaaaggggaagaagtcaatgattatgaaggatatggccaggtaagaaggtggaggccagtaaaacttaagagttcagagtcacagaggctgacttcgccttggaatccagagcaggggaggagctgaacacccagctctgtccttggcctagagcccgtgggattctagtgggaacccctctcccttttctactggtttaacaatttctctccgttgcctccccaaacccacaccatcccacatgcccagcaaccagtgccagagaggtaggcatggtcaaaccgtattatccttggttggtgattttaggggcagtagatggattttgttggcaactagaaaatgggcattggcaaaggacaatgtacaattgttgccttcaagagtggcctgagtgtttcatgaataagaaagtttgagaacactctaataaaacagtaataaagagtgtcaaagaagatttttgagttaaaatatatcagtatgggccaggcatggtggcttatgcctgtaatcccagcactttgggaggccgaggagggcagataatttgaggtcagaaatttgagaatagcctggccaacgtggtgaaactcatctctactaaaaatacaaaaattagtcagtgcagtggtacactcctgtaatcccagctacttgggaggctgaggcaggagaatcacttgagcctgggacgtggaggttgcagtgagctgagattgcgtcactgcactccagcctgggtgacagactgagactctgtctcacaaacaacaacaacaacaaaatctcactatgattttccagataaaatatgatgtaattcacaatagcaaagacttggaaccaacccaaatgtccaacaatgatagactggattaagaaaatgtggcacatatacaccatggaatactatgcagccataaaaaaggatgagttcatgtcctttgtagggacatggatgaaactggaaatcatcattctcagtaaactatcgcaagaacaaaaaaccaaacaccgcatattctcagtcataggtgggaattgaacaatgagatcacatggacacaggaaggggaatatcacactctggggactgtggtggggtgcggggagaggggagggatagcattgggagagatccctaatgctagatgacgagttagtgggtgcagcgcaccagcatggcacatgtatacatatgtaactaacctgcacaatgtgcacatgtaccctaaaacttaaagtataaaaaaaaaaaaagtaaaaaaaaaaaaatatgatgtaaaatcccaatatattatctgttctacccaagtcatctctaccataattatgaaatgtgatcgcccttccttttcatatccagttattatgacaggaacctccacttgccaagttgctaggaatttgcccatttcaacatgctctcaaatgatttaattagctcacttgggcaagttaattaacctccctatgcctcaattttctcctctataaaatgaggagtctgagtcaaactatggccccagatttacctgtgaatctcttaccatgaacttcttccaggattatgcacagtgagaacagctggggacacccctcctctcttcacaggattttagtcaggtcctgtgtggcactaacaagacaataaagaagtaggacatcattggtgaatttcccaaatcccacatttatgcatggtcaatgtaaaacagaacacagtgcagctgctttggttgaagtagggagagaaactcaaagccccatctgctcggcttccctgctcaccttaacccttcaagccactctgctacgtttagaatgaagatgagatcctcaaagcatcatttctataatagtttaggagaagtttatgggcaaagtctccttttttctgtcatgaatgaatcattttactttagggtagccattggccctgaatatgaaaaaagaggttgcataagacatcagaaaaaaaataattctctgtatatttaatattctaagtaagaaaccaaaaaatttaaaaattaccctgtgctaggtgcttcaaaatatattatgtttatactatccgccacaactctgtgaaaaactattgtcctccatattatagttgatgaaaatgccccccacttcctcggcagaagtgaaatagtttgaccgaggtcataatgctcttaagtgatggatttgtatgatgctgaaggccacattctttccattcccttcttcccatttgtggagccttcaggaagtgtattgtgcttctttaatttttgttgtaatatatcatgattcattattgccgtgagcagagaagagagtcgaatagagtcagtgaaagttgaaaagcattgcatacaaagttgggagcatttaattgacacgttgtcattgataaaactgacatcaccttagaggcagaggacaagtcctcacattgtttctgggacaggggcatggaaaaagagaagctttcactaactccctttatgttgtgtatctcaatggctactaaatacacctctctcctttcttttttcttttctttttcatgccacaaaaaaaaaaaaagtacggtaaatttttaggaactagttacagttataactagttacaccactcccatcttcaaaatcatttagctgtcccaactcattaaaggtcaaatgtggtaaccagaatatggagatgatctttgctaacaaaggttcagactctttacactgtgagctggattggatttagattttgtatcagtggttgacagcctatgatcttaagtttagtagcttaagcaatttatattcatcaaagttactggtaccttttccctctgcagctgatggaaaacatgtcctatttaattggaaggaaaagcatcttaaaataacactgaatcttggacatgttgaagaacaaatagtttcatttccatgtagtgcgaaatcctcattttattcgggacatggctgacatgtttataagctaagtttcttttcaaactagagaatcccacagatgtctcatctgggaggacttatgagctgtgtgacttactttattgttattgttaataataaaacaaactgttcaatttagaaaccatttcttatccttttcattgctttttacacatttcctttatagttataaaaggattctttgtattttaatagtttattcattcattccaataaaaatagctaaaaaataaaattacaataggcactgggagtacatcatgtccttggaaaccatattggtactaccgatattaaaaggaccagacagccacagataaaattctgccaccgctttcctgaatgtatagaggtcactttggtaacattgaatattactgctgcaatgtaaattttcatttaggaaatgggatcctttaaacatgcacaaattatttcaagttgaatacctaggaagtcaaaggagaacttaaggtcctatcaactacccaagaaaatatgactcttctcctccatgaatgggccacacactatgtggcaggtttggctttatatatctttggaaacttggacatgtgtttcattgaacactgggggtctggtagatgtggatggatggagatcttctttcagctaatatatgaagtgttaaagtttacatttgcctcttgtattcgttgccttcctgtcacttgtcttccctattacctccttttaagggctcttatactggtgcattgaacagactagtgacagtcttggtaatttttgtactatgcacatttattcctgtattaacacaatctattatttagaatcaagtgatttctgtaactagtagcaagcagattagaagatccatgagatcaagtatcatgtatcttcccccttaatcgctgtattaccaatgcaacctagtggctgcatccagtggatgcgaaatgactatttgataattgaatgaaatcatgttgtctatttctgggtagaaatattgaagcacagggcttcaaagttatacagcaagtaggtaagaagataggaactagaacttatatctttttgttatcctaatgaatctctgttttccatcggattctgtttctccaaaagaaaatccttaacatataaaaatcagattgttaataggtaggttaatttttcccaaattatttatcaaacagggaattgttctagcctaacttcctcagcaaaacatcttggagatagaactgtgcaattgttgtacaacttcaagttcagataagttttttttttcctagaatctttcagactggatatggaaacatctatgagcaatatgcatttgattcagttaacagtaaaatataattcaatttattgtaacaagtgtgatctactttacaagcttgaggtacaaataaggtcatgtggtagtcatcagtgctgtttaccaaatatttccagctttctgacttttggcaatgtggcaggattcactttctggctttcttatagaggggtgggatgaagactagatctggccatggtgccacaaacagagggttgtatgtcatttccaggccagagcattctgtatcctgcctgagaccttgaagagctctcattttccttggcatggtggactgataaatgcttgatacagtggcttctttgtcagcctgggttcctcaatgattgaaaggaacagagtccactattgacccacagttgaaatatagcatggaagagaaatgaacctttgttgttttaagccactgagatttggagttgctgttcctgtaacataattcagcctatcctgacaaatataggtactattttttattttccagctaatctttgagcccttcagatatcatctgcctcctctattagtttctccgaaaaaaaaaatccagtgtattattttacccaaaaaggtcaggaaaagactgaaaagtcatattagcatgcttctgccttttctccatctctgtcacatagtgtacccatggcttctcacagacaagtggattctcatctgctggagtgataatatccttgcaggtccagatctctgcataggtagtgccacatgccaagatatcagctgtttaaattcacaaccttagctgttgcttaaagcgcagcagtgtgaaagggtaactgaaccacagcactcaatatactggaaccatgcctttctcttgagttctggaccatggtgggcccctctctaccagtagactatagttagagtgatgattcagccaagagattctaattatcttcactaccaaaagggacgaaatcaacgtcttgaaccttgttcagggagctggacacatacacaattaattcatgtatatcagcatgccaggtcattactatacaggcagatgctctttagaaaggccagtggagggaggattcatagaggtgataattgttctgggcattcatgtatataaatttctttttcctagcagagaactagagaaagggtcactgcaagaagagggactgttcacgtagacatgaaatccagagtgagaatgagcatgcaggggtcaaacatctgtttgatgggacatcaacatctgttaacgggacaaacatctgtttggatgcatgggatgtgagccataactgtaggatattatttgagaaaaccaggtggtcaagaaggtgacagaagatggtaactttgaccaatgaatgacagctaccatcccagacacaggatctgtgtagatagtgtgcaaattttcaaaccacacatgtgtgatacatggctctcagaatggagagggttgacatttgagagagagagaatattagaccgtcaaaatactgacaaggggataatgattcttaataagagcatctctctcatctccaagaccatcttcttttctgtccacgattctaaacttaatggtggctgaagagttggaattgtaaggggaacctaaatggggcctaccttcctctccacttccttctaaatgaaatactgtctcttgttgctgctgccaacttccgatgccacgggaagcaggtctgttttgtggtcagatgagagagggaggttgaaaccgacactttaagggaagcctcagaagctggtgctcgagatttgcttgctacccaatattatccttgccacaggataccatagggttgggagagggtttctcagaagtttgtgggtagcgtgtgtattctcattaattaggaaattaaattgttcgctgtaaattgaagggtaaggaatgtttttatttaaaattgaggaaatgaagtgtgggagggtagatgatagccatgctttttacaccaaattgcagtggtttacttgcttttgctttgagggtcatattaacttcagcaccaaagctggtcccttggaatgcctttcagtcctcctaagaatggattcattttataagagttcctgtatgagcatgattctgggtaatataagtcaccttattgattacaagttttcattctcttcctccaaactgcccgtctgattttctttaatattctctcttactccttgtagaaacaaacttaaaacccaattgcttttgatttctaagctaagtttccccaggcttaccagcttgttgataatacataataaactgtagtattgctttctacccactggtgtaactctgggcctctagctataccttcaagcagtcctttcttattttcctcactctagctccccttactggagtccaaatcccaggaagtcaagtaggggtagtgcctgagtgggagtgctatatggatactggtctcagcattcaaagaaccggcaccatgtgctctggaagcccttccaaagtgcccgtagggtgccgggatacctgcgtttctcattgtgaggaggctgcaccaggtcacatgtgaggagaatgcttctcttcctctttgcagttatattttgtctgttgggctctggagaaacatttcttgtgcccgtcagcagttcttctttctatgggactggtactatgacccatacctgaagttgaaagcagtctgttctgccagtcacagcctcttcctggatgtgtctgcaaaaccatttcattattctttttcaggaaccttcccccaaacaaacagagcaaaaatttccaacaacagagttcctgttcactcatttcttatgtgtgtgtgaatcccaatgtagactcaagctggatttctgtgcatctaagaaagttacttcatgcaagtctcccattagcccaaccaacaaagttgtgctggaaacactttcacccaaatcccaggcatcattgtggctagatgaatgggttaccagggctgactgataacacatggtttgcagaatgtcatctaaggtattcattttgttaatgttacaaggtttattagagaacctctgtgcatctgcttaatctccagggctttcacatcagtttgggggatataattgtaacaagttctgttcatttttctttgatgagagacatggagactttaacttcctaattgatttgaaaattgaagcctcaaatacctttgggaagtagaaatcatgaaaaccagagtaaaccacttttctttttttcttgatcaaggggacatgtgaattcagaatttctgaagaatcaaggtagagagtttttttttttttttaataagacttgtggattggattcaaatgaataagcattcatttcatataaagggagtagatatgtctgtggcatgaggatgatgctcagaattgtctagttagagacaattttgttttgtttttaagctatctttactttgatatgggggagggggcagttaagtactttttaaggtacttatgttcaacactatgttccaatagtttttggtcaaaacatgaaatgtaccactgtcattctaatatagcaacataaatggaatactataaatctgaagccagttctagaaagaaagaggagaaaaggatattttttaagtcccatatttatatgaagttcaaaactgcttatggtagtaggcaaacaaaatttctttagtttatctatgtgcaggaccctttgaatggccagatgtattagtagcaaatagttcagtatttgctatttggatgtcttaggaaatagcttccaggtgggaatctgtagagtttggcattggggtgtacaatctaaaaactccttgttattctagtttaccttttgtcttgtattgacctgaagttcctagctcatttgattggcaaagggagagatctgggatctgcagacaccaggttcccctgtggactgtaaccgtcaagaacacatgtccttgccacaaatctttgaggtactcatgtaatggatttctgagtgataaaataatactgcttagaaacattttctgaaggttttgagtctgttgtggaaatacttacatgaaccacaaagtaccctggctttatgctgtggttcattaccatgaaattccatgatgtggagtatcacaggaaccttacgctttgtcttctagtatttgacaacagcagctctgcatgagaaagcctaagcctctaagacaagcttgtccaacatgcggcctgcagacagttcgcagcctagatggctctgaatgtggcccaacacaaatttgtaaactttcttaaaatgtgaggacttttttttttttttctcatcagctatctttagtgttagtgtattttatgtgtggcccaagatacttcttcaaatgtagcccagggaagccaaaagattggacaccctttttctaagatctaacccttcaaataagatctaacccttcaaattgccaaattcaaagtgtatctaaaaaaggattgccctttgcctgagagttcgcattttaaagcactcaacattttcatttagaaatagtttctttggacttttatagacatactctttcaagtttttaccttggagacctcttcatataacaatacttagaattttaaacatggtttcactttaagtaatctcagcccaactctgttgagtgaaatagatttgtttcctctctcaattgtgtctgctgtaatgtaggatcagattataggtcaaccctcaaaccatggttatatacttaagccatgggaaaaaccaaccaaccaacccccaaacctgagttactgaggcagtaggatgctgtgctttgccatggttaccacgggactgaatgaagggggatgaacccagaaatgaaaacttaaaagaaactgttttaatgaagggatctgtcggggggaagaagagggctccctgcttctggtgagcaaacacagcagccctgagcctttacagcccttcgtatttattgggtagaaagagcagggaggaggaggtaacgactggtcagctgcttgactgatcacaggttcacattattgctaacaggcttcagatgtgtctattcacaagaaacacttgtgcctgggttgtgactgccctcagtattccttctggaccacagactcagtttgtcagtttgccaacatcctgctttcatgagaacagtttgctgtttactcatatagcctccagtggtatacagagctgatcatgaccctcactcttttggcttgcaacagtaggaagtcatagtgtcctcatgaaaacctactggaactgtttccttcccttctgggatcttctgttctttttgtcatccattctaatcatttctaggtgtatgtactatctctcccttccatgggattagcaatcccatcctagacattattcatagtagtggtaggattttccaacaggatgacactcttaggatattctcactttcttctagaaatggtagaaatttcccaaacagtcttgggtggctgcttttcagaactgcagtagtgatgggatgttggaacaaggagctggcatagtaattctgagcataaataggactgaggggaacagaactctcatgtgaacttctagggaagttaaattctaggatgaattaaatatattcttcacttacagttatcctctagttggtgctcatgtgtttttaagaatatgtaacctctatttttcaaagaaatgcaacctgagagtatagaaaatatgttgatttaaatttgattttccaaagttcagactctatatttacacttgaataattggatgttaagagactaaaagggtttagatacataggaatatgtatgacaaatgcataatgatagcgaaagtgctttctttggtattcttgtgtgcccaaggttacccataaacccaataaaaaagaagtgatttcctctacttgatttgaagtagtctctgaatttctaaagacaaagattacattttattgatctcagagttcccaaaagagtctagtacaatggattaaatatagtagctgttccataagtttttttgtgtaattaagttcctgtataatgaataatacttttatgatttgaaagtaggatagtactgataaaatctcaaatcccttgagattttattctggatttagatggttctcagccttatggtctgcataaatagtagcccttagcattgttcaaggcatgaggccctgggtttagggtgtaagtcaagtggactagaaatgagaaaaattccccttcttatttggtatgtcctgcttttcaaaaataagttaatgatcttgccatgccctatcataattagtaagcatgaaatttaatttgacatttcatgtttgatatgcataaacttgccccactattttctatttctagaatgatcttcccaacatgcaaatctgctcatgtcattcccctgtttaaaattcctcagtggcttctcgtgagtttaagatatagataatatccttagcgctatttacagtgagttacaccaaccttcatctttcattatccccagtccccactttgttctttagcccatcctgaggtggccaccatttttcagtagccatgttccctcctgcttctagacctttgcataggagtgggggaggttcctcaatgtgggggtaaaattccgggcaggcttctcgtttctgtgcttgaggcatattttgaaggaagaaaaaaagtattttgtgacatctttctgagtgttcgcccgaggcccttgctatctcctccctcttaacaagtttcatgattaacagagcagacaagcaatctccctgcaaggcctatgatggtcccttgcttttctcagaaaaagcgtgggaacttgtaggtttccttgaatgttacatgaatctgcttggtttattttgtatttttaattttttctttctagatcactggcccttcctcttacatagatcaacagaagcatctgtttttagaatgtgagaggatgtcatgttttcgctcctcttctacaagctcattaagtataaataacgtatttaggtgaaggactttatgccattgagccttttaatagactagtgatcttaacgttacacttccgatgcctaagatatttaaaccaaatcagtaagagtagagagtcattttcattcagtttggggacaggggcctattgaaaacccccaccttgatcgtcccttattcacttacagaaagaaagaattagaatgtaggctatagccagtttagggtgctttctgtcactgtaaggccaagtaggagtgagttaaagcttccttttccaagaaatcatcacactcctgagtgaagagcctcacctttgccctctccctatttgctcccaaacgggtttgcctgagagcttgaggttcactaacacctcattgtgagtgggaagaacagaacagaatgccaaggagcaggcaaggacaggaggtcagcacgctgacccggattcaaaggcttgggtttgttgaacaacttcacccagtcctgccagcccgctttgatggccggcgttgcacggtattgggggctgtgtgccctctgctgggcagagcagcacacgcgtccgcctctcagcgcctggcttaaagaatttcaagcttttgctaacacgggggcagattttcctctcaggagtgatgctctaccagcataagacgatggccatggaaatacagccttgagttatttggggaaattttatgtcaaagaaacaaatgataacttactttatgttttactccaatcaacttcagagccaccagtttcctttcatcgtggaatggggctttacatttgctctgatgacattcagttcagtggcacaatacaccaaagtgtacgtctttatgttcacagacacaaatggacccacacaaagaattacctagtaactcactctttccactcaagatattccgtgtttttttggagaatacaagatttggcatatttgtgtggctttccttatgtttaacatagctctttctaaaatcaaagccttaaaatctatttggatttgattcattcatttatttttcagtcactgaacagacatgaatgggcaccgactatgtacctgccattgtgtagggctgtagagagcagtcagaaatggaggagaaaagagaatacctacaatcttgagaaactccgtccagaggagaacttaaaaaacacactaataaaggaagatattaattgcgagggaaacacagagatgggaataacaacactatgaaggggtaggagttaggatctgctctgcaggctggtgagaggtaagtattaaaagatatttgtatgtttgaaagatacttgtatgtttgccagtaagacaagtttgggcgtggcagatagtagatggtagaagaaatggtgtgtgtgtgtctcacagggccttttgagaggctggagtccaaggagtggagcttggtgagaggtgggctagagtggtaggttacaatcagtttgtgcagtgccttgtctagcatgctgagcagattgcatcgtattcagtcggagaaggcaagtcgttgaacgactgtcactaggagagtgtgagggctgcttttcattttagaaacatctctcaggaaggtagtggatggatagagggtagaggaatgtcaaaaatagcaacaggaagctgtctaccttctgttggagcagaaaagacaaaagaagaaggacaaagagagtggggctcctggagaaaggattaacgggaaagctttctaagaggcagaaagttgattgaaggtggaggatgacaaagaaggaagcattgaagaagactgaaagtgtggatgacactgataacaggatgagctgagaaaggtttggtgctgcagtcgtgagtttcactttgggcatatggaaactgaagcgaccacgtgtgaggatacccactacacagatggaaacagggtcttcagctcagagagagaaaatgcaaaagggcgagatttgggatcctagagcatccaggaagcgtctttgtgtggaatacaggggaatagaggcaaatggagcctttccttgtttcctgcttcccttttacttaggagattaaagtgacagtttcattaactgcttttaccacattaaacattgttgaggatttggatttgggtaacattttgtcttaataagaaacctactaaaaagtaagtttttcaaaaaatgttttactcttacatgatcaagtctttatcatggaacctgtcagcgttaacatctaggatttaatgtcaaccaacgtaagcttttaaaaagccatattaaatcagaaatgacttaaaaataaactctagatgaacttgatctatttaagttaaaggattaagttatatacatgatggagcatcagagattgagtcctttttgggtgggccttggaaagggaaaatgcagaaagttctaatttgttttgctttcgaagaagaatcatcctttttatgtattcatatgcataatttgatcagaaaaatgcttgatattctaaccttttaattaggagggaggaatgtagagatcatgttgtaaaattgttttccaggtgaggaatctgtgcaataaatttgagaaacactgaaggctttattgtatgctttttctggattttttttttttttttgagacagagtgtcactttgtcagccaggctggagtgcagtgatacaattatagctcactacagcctcaacctctgggctcaagttatcctcccacctcagccccccaagtagctggaactataggaatgcaccaccacactcagctaatttttaaattttttgtagagacagggtctcactatattgcccaggctggtctcaaactcctgggcttaagtgcttctctcacctaggcctcccaagtgctgggattacaggtgtgagccatcacacctggctgaattttataatttaccttgtgacattgaagactctgagaagttctgcaggaacctagcgtttcccagtcttatttgatggccaacccagtatttcccagagtttggatgatgttactttaaaagttacctttataattaagtagagcaatgtaagtgttcaagcttttagccacagagctcagttcaattagtaaacatgtattgagctcttttatcatagttaccctgttaagtccccaaatcatgaagattattcataaaacaataataatgacaacaataatagtagctaagacttgttgagtgcatactaggtgccaggaaatttactaagcatgttgcatacaccatctcatttaatcctcacaactctgggagaaaagtatccattttagaaaagaggaaattcagacccagagaggtgaagtgcttttcctaaggccatagacctagtgaattacagaactgggttttagacatgtttctacctgatactgctgctcacattcttaactaccatagccctgtctatggagaatttatggcctcaataatgtccatgaatatttccaagatgggcttcaggtattttgacttgagggtcttcaacctgtgagttctattattagtttctgatattctgcattaccctgaaacgtcttcctaatttagaaccaaggtagcccctttctctctgaatctgaagctctttgtatcaaacagccttttgttgggatgtagtatctcgtttcttccacattacgtaatgtaacatacatgaagtagatcaggatatagctaatttacaactttcctgcatcgttcctgaatgttcctttttcatttttttaagtgggaaaaatgaacactatattttaaatcttccttatacactctaggcaatacttaaacatttaactcttagcaatttgtgtttttaatggaatagggttttccttttgggtcattttcgtagggtaactttggttgtccaaacatactctgaaatacgttggggattatggtttcaacacatgtaagcctaaggccaaagtatgagtaacacatgatattttgttacatttcatgaacaaaccactgttttgtggtataatacaaaacatagctaagtagtttagattactatcaggcattacaaggttaggttttcaatttatgggattactcaaagctcattagaagtattttctctagctctagggaatgcagcctagaaaatagtggtttcccttgtgaaaacggtgtgtttttagtccatttattatattttttagtttatctcaattatgtccttttgtactttagtacaatagttgaattcacaaataagcttacaaagtctgttttaccaatgagccaaaaatggtaaaaagaaaagagggaaaacacattgttgttatttattaacttaaactgtcttcagaatgtcacggacactctgtcagtgacacttttcagagcaaacctactgtgattggtagaacagctccgagttgtagttctgtctctagcatacactacaatgccagtttgtctttctgattttttttggttttctcatttagaaaaatgggcctagtatcctgtattctgctatgtgaatgttctttcaaggtatgctaggaataacatgagctttgcaattacatataaatgggctcctattctcttgctgtatgtatctgtgatctcgagcacattatttaacctctttgagccctagtatccttatctgtgaaacaatgataatggtagagtgtacatgatcggattattgtgaagattaacttaggttcatgtaagtaccagagaccaggatggatgcagggtagcttctcactgcatgggaagttctctccattcttccttacaatagaaatatgattatcccagcactttgggaggccgaggcgggcggatcacgaggtcaggagatcgagaccatcctggctaacacggtgaaaccccatctctactaaaaatacaaaaaaattagccgggcgtggtggcgggcacctgacgtcccagctacttgggaggctgaggcaggagaatggcatgaacctgggaggtggagcttacagtaagcagattgcacctgggcaacagagcgagactccatctcaaaaaaaaaaaaaaaagaaaaagaaatgtgattatcactttattctttcacacactgtttcttaacttttgtttacatattggtacttcaaaattgcactgaaaactcttaaaaaaataacagcaaaacaacaaatggattgtgactatatagctgatacctgaagaattgggccgaatccgatccagcacatgtttactgaccttttgctttgcataatgcattggagtaacaaatgatctctttctgagttcttgataagtcgacatttcaaaacgctaagtgatttgttttttgattttttttaagccaaatcagaatgcattataggccattactttcaaattttcctttataatggagtagagcaatgtaagtgttcaggctattagccacaaagctcaattcagttagttaacatttattgagctcttggtattataggtgccatgtgaggttcccaaaccacaaagcttgttcatcaaataataataataacaattatttcttttggtttaaaatggaaacactgaccatattttaaaaactgaagtattgtctcgtctgcaggacaccacttccttctggagtggcttggggcctaagggaaagggcagcagccattgctctggaagggaagtgtgaaggaaaaccttcatgtagcatccgcatgtaagtcttaagtacacccacattaaggaaatatttatacatgtaatttttgaataatcatttacatctgggtctctatctgcaatccctttaacttaattcttgcaaaccttttctcttcttgctttgactaccaggaagcttaaaacagaatctgtggcccaattatattaactttgtgatatattttttagcttgggtgttatttttcttggtcctgatttttgtggtgtgtcttttattttgttgtctattagtgagtgataaaatttgttgagtagggaagagcattaatataatacataagtcagaaaaaaattctaggaaaacattttgctagaagagagctagttctcaaatgattcagacattcgacttgtaacgcgtaatggttcaacttacacctcatctgctcccccttggaaactgcatttgttttggcaaagccaaaattgagtgtttagaaatggggtgttctgagaagaaaccagcaaatcctagtgattctggactgcccttggaatcccagtgctggtttgaacaataatcctgatttttaacagcttattatgtgtggctccactttgggccaagggaatttagttgtgtttaagacttcgaattccatcatgaactttggtcttgcctcctgtcagtttaagattaattatggtaattctcaaagcaactgaatgtgtgtcagaatttctatctggatcagcactcctcctctgatccagaacccacgtctggggaggctgggtaaggaagtggaattaggggaaaggcatgcattttagacatttcccctgagtgtgcttggttctgactccaggccttgtctgcccactgttgacggtaacttcttgtacatttgctgtacatttcatggttcactcatacagttttttagtcagggtgcatcagatttagtaatatgtctccagaataaccatatgctttgaggtatatttcattttccaacactgaaaatgaaagagctattaggctatgaatctgtaaacagtcagtcgttccctgtgtaaagtaaaatgaattatcataatttattagcaaattcaattttctttgaagtgctagttgtattttcaggctgcatcataatggttagtaatgactcatttaaaataataccctaggaagttttccattttagattattaatggtggggcatgattgaaagaggaacaaaacatactgaatgactgaatgtcctttcacaaacttcaggaaatagggttactggatcttcatgtggagtgttgcttttattttaaatcaaatgtgatctctacaccatgtgccccatttcttctcttgggttaataattctctcacaagatatactgagttaggtagtaaaattgcatagtagtggtagtagtaacaatagtactcctagtaatagctaactctttttgggtatctgccaagctttcttcaaagtacattacgtatattagctcacttaaaactctttgtcctgtgagtcaaactttcttattatctccattttataatcctattaaggcaggcatttttattatcctcattttataggtaaagaaactgagacatagacaggttaaagaagttacccagggtcacacagccattgagtagaacagctgatatgatctgtgcagcctgtatgcagagctgctgctgtaaccactatcacagagctgtcttctagtcatttttattgttaatattttataaatttatgtctcattaaagcactgttaaaaactttgattcccccccctttttttttttacaacagatcactgattagtaacaacattcttaaattacaataatgatcctcataatgtgttatgcagtttatttctatgttcatgatgtctcttgtggctagcatttatggataggccgtttttcaaagtactttatatctgcgagaacctttagtcctactattatttaggtaatattagataacagtctcttcttcatacgttgttgtgagaattaaatatgttcatctatgcaaagtgctctggaatatgtggctcatagtaagtgccctggaatgctgatcattatgatccatatgttacagctggggaggctgagactttagtgaggttgaatacttgctcgcaggcccttacccacttagagacagagcaaagctttgaactcgtacacttgccctctagagcccacacccagccaccacacaaacaagaaatatcaggaccttgtctttgtttactttggcaaaccaaagcttttgtttagcttacaagaagcagcatggtatcaagattaagaggacagagtctggagtcagccttcctagattggaatagcatcaccctccttccttgatagctgtgcagccttgggaaatttacctcaactctctgtgccttttctcatctgtatagtgggaataattacagcttgtatctcacaggttagctatgaagattaaatgagaaaaacctgcaaaacttagtacagtatctggcatatggtaacattcaaataatattagctaacatgattattagaattgtatttgcatttcttaaatatattttgaattttaaagtcactgcttaaatccttggagccaccagatgcggtggctcatgcctgtaatcccagcactttgggaggctgaggctggtggatcacttgaggttaggagttcgagaacagcctggccaacatggtgaaaccccgtctctactaaaaatacaaaaattagctgggcatgatgggggatgcccataatcccagttactagggagactgaggcaggagaatcgcttgaacccaggaggcggaggttgcagtgagccgacatcatgtcactgcactccagcctgggcaatgaagcaagactccatctaaaaaaaaaatccttggagccaaattcaacgatactcttatatgccagactccccctgagagtctgtatgtgtgaagcctcttacttcgaaagactgtggggctgtcatagcagggttttggtgggggccgtcaccatgaggctgctttcacagctggagtcgctaaaaggggcacgaagtgaagatgccctaatgatctgcatggccacatttgtttcgggcactcagaaactgtgtttagacagtttattctctgattatgtgtggagttagacttcacttagctccatcatgactttgttttccccaactgggatagatggaggagacagagagataaagagcataggcagtggcttcttgacattagttttcctcatcagaattcttttattctggaaagatgagctcaatggtgtagtcttcttgcaacagctgacacacacatttgctcttccttcccagtcttatcctgcacccaattttttttttttttgagatggagtctcgttctgtcacccaggctagagtgcaatggcacaatctcagctcaccgcaacctccgcctcccgggttcaagcgattctcctgccccagcctcccaagtagctgggattacaggcgcctgccaccacgcccagctaattttgtatttttagtagaaacggggtttctccatgttggtcaggctggtctccatgttggtcggtttgatccgccctcctcggcctcccgaagtgctgtgattacaggtgtgagccaccacgcctggcctgcacccagtatttctaactacatagtagtgcatactatgggttacagtttgaattttattttcaagttatttctgtcatgtttcgaatgtcatatctgtgctaattcgtatgtctatggtttttagtctccactctctgaaagcctaccatttaattcagggaattaccctgaggtcagggtagaagataagccaaaaattataaacaaccccaaggctgttttttttttttaactacattatccaattgactttgaagaatgtttcttcatttttcttgctttccctaaattttgttgagttctgcattcgagaagaggacacattcttgtgtgtctatagccaacttccccagtctgttctgtataaagcaagtcagaggatgttaatacatgctctgctaaagacatgtactgctttatgttagtttgggaaccaccagcacatacaatgtaagcaggcttcttttctgctggactttgagaatcctttgctaatccaatgtaggtgtctgtctccaggaggagacaatcatatgctgacatctttatttcttgcagcatctcacaaagtcagtgtcagaggaccatgctttgggaaatgttagtttatgcagtagtcattgctatagatggaaatagggaaaggtgcaccagcttaatggtagttgtgctgtttttttttaaagattaatgaggccataccacagtttattaaaaacaaacacaaaattgttgaaatcagaacttaggaaagtgtttttctcctgtattgaaaataaagaggaaaatgataaaggccatactactcaatggctgtgtgaccctgggtaacttctttaacctgtgtctcagtttctttacttataaaatagggataatgtggctcacgcctgtaatcccagcgctttgggaggccaatgtggatggatcacctgagttcaggagtttgagaccaggctaacatggtgaaaccccatctctactaaaaatacaaaaaatagccgggcatggtagcaggtgcctataatcccagttacttgggaggctgaggtgagagaattgcttaaacttgggaggcggaggttgcagtaagccaagatcacgccattgccctccagcctgggcaacaaaccaaaactccatctcaaaagaaaaaaaaaaaagaaagaaaaaaagaaaatgataaaaatttaaaaagaatttatttacaaacacactgctaattctatattgaatgctgaatccaccacaaatttgatctaataacatacagattccatctatagtcagattgatgaaagatcacccagggaactacaagctcctcagttttcaaagattttttttctttaaacaaatgtcgcaatacaataaatatagattaacaagcaatttttttaacacagattttaacaaaaatgttttctggacattcccacctacccagaaaaccatttttccagaacctctcaatcccagtaaataaaattgtttattgtggtgttatgttaattcatgccctttaattctcaagtgagaaaaaaatttattttttgctatcaagataggaacctagaaggatcctgagcagaaagtcagaaggccttggtgaccttgttaaatacagatcaccatgcctcttacagaatgggtacccaacacatcgctgtagaatggactttttctgcctgagctcatctgctgttcagtggagaagttgggcagaatacatgatctcctaggttctttcagtcatggaaatgtgggatccgtggtatattgtggttattcaattgtttagcgaaaacacaaggatcatttaggagcaaataaaatttttgtctttctatgtgtaatcataagcccaagtataagctttaattttaagaaatggggcttcccaccttcttctgcttcatcctcctggttgtgtgtgccatggattcttatgtgcccccttcactgcatggaaagtaaaataagtgattaagaagagtttgctctccattttgaaagacacctataccatttaatatgtttaataatattacggtttaattaatgcatttatctcttggaaacatcacctgtttcttttccctcagaggtctctatattttttatttcaggatcactacctaatgtgaaaaatagcataaatatatgactggagaatgtggttaataattattgaatgactattatgtgccagatactgaacaatgtatttacatgtgttttcttctttattctttgaagaaaccaggaactaggtatgttaaagtagtttttttttttctttttgagatggagtcttactctgtggcccaggctggagtttagtggtgcgatcttggctcactgcaacctccacctcctgggctccagccattctcatgcctgagcctcccaagtagctgggattacagttgtgaaccaccacgcccaactaatttttgtgtttttagtagagacggggttttgccatgttggccaggctgaccgcaagtgatctacccgcctcagcctcccaaagtgctgggattacaggcatgagccaccacgcccaacattaaattagttttatacatgagaaaatcaaagcgaaataaagctaaagtggtttgcccaggatccatatgctagtaaatgatgcaataggaatgcaaacctagttatcctcagagacaaagcaaactattttggggagtaagtagtccacttgaagtgcatggtggattgtgggaccatggaacgagtgaaacaaggaaagactctgaaggtggccataaggactattgtccttcactcagggagaagtcctgttggggaacagtcttcaatagaagtggggttcagtccccttcccaccttgccctccaaggggaatggaggcctcaagtagcattttggtctgaatggaggggtcctggagacaacacatttaacagcatcttctatttgattgatgttggttgtcctggaaaagtctatattttcccatttgcatgtaaaacccaggtatccaataaatttttccatttcaaatttgaaaaggtggtttttagtggattaaaggtcaggcataattatgacttttttcatactgtgccacaaggcaaataagttttgtcttattttttaaacctacactttatttattaatctttttcttcttgtttaatatttgaaaaaaaaaatccaaagacatttgcctctatttcccactattttgaagaaatcaatcctaaagactggaattatgtctttgaaaaatggatgaacactattttaatgtctagctgaaaacctttgtcataagggggcttaatgaatacttttagatgatcaaggttagataaaagctttgagaggtcatccagtcctaggctttgaataagatctcctccaaagtttctgtcaagcttgaagctttatacttttatgctatctgaagtgtaccgatgaaatgtctccttttgacatatttttgaagaagaactttgactcacagtacaagagctcagatgtccagtaaaattctgattcaactggttagatttatatgtgtgtgtgtgtgtgtgtgtgtgtgtgtgtgtgtgtgcatgttttcttactcgttgacttgctcttccaggagaaaagaaatttagctacttgaaaaaaaggcacttaacttttatgaatgccattatagaaataacttactgggattaaaaagtgaaattctaaaatctgggaagacttaaaatgtcttagaaattccataactttcagattttgtctataaattgattctaaacactgaaaaccaataactgcatacttttttttccaatggagagctgtgactataattttttctcaaagctttcagtgatataacccttgtgctactcataaaaaagctaaagagattgttttttcttacattgtactgattgttcaacatcatgtcttccttcagttttttcatatgtcatcgactctgaaatactatttttctttttgttttaattgccttctacataattgagagaaaaaagtatttttacttcactataatcctgttgcttagtcattatgtatatccatttcattctttctctagaagacattcttgggggctttttgaattttgagtgattgttttctagacctgttacacagctaatgttctgagaattattttcaaagaactcttaagttggttttgacattctttattactgctatctttcttttttgatcctctcaattcttattttgttagagtactacttgatatctctacatggatgtctcataaacatctcaaatttttctgctagtcttgctctacccaccgtcttctgcatctttatttatggcaagtccatctttcccgttgctcaggacacaaatcttgaaactacagttgactgtctcacagtccacatctcactcaacaggaattgctgtagctttactgccaaaataagtcagaacctaaccagacttctactgaagccatgagcagcatcaaagtggtacccatactactgtcctagaattgcacatgaccaagtaactttgttttcatgaccaaactggaacttgaaaggagatattcaggctagtagcatgtcttcatacattctgtgttgaatatgaaattttccctcttcgaagatccttgatggcatttgctagctattttcaaataatttagggactgtcagaagtaatttttggagttcacatgatttattatttatttgtatagaaacttcgttcataaggcactatacatgattatctcatttgacttttataatttttgttggtatctattttatcactgttttgcaagtgaagaaactgaggctcagatactacattatttgagctaatcttgttaatggtgatgtcttcagaatttaaatctgatttttctgtttctaaattttattttctttctgtcatttctgtcctctaggagacagaattaggaaacaattataagtctgaacttatagatagaggatcctgttgaacaaagatggacactctcctaattagagccatccgatgttagaatgtgctgaaaacccaccgtctttgagtcacattctaacattcaacactccctacctctacctcctctcccactctggccaggaatactatgggagttcccctttggctagatgacgccttccatattttctttcagagatgagattctattatttacaaaggcccatgggcatgtctgcttctgtaagaacccattacatcagaaatataaccaggcctcttgcaatcccattttaatagaactattttaattaaataattgaaacatctacattactagtcatgagtacttctgccttgtttattaattctttaatgtttgtattattgtcttccatcctatagtaggccagtatatttaaaatgaaggctaaagaaattttctgataaataattggaaaatattttgtttattttacattgccaaatggcatacatctattaattttgtttttttccttcatctagagtactcacagtttttatattaaaatctaaatgaagcaaataatttctgccaattttatgattgaatttttttgtttgacagtttttatatattaataatgcatggcctttccatcagctttacaatttttgtttgggattttttaatatgtgggagaatatatttttattatatagcttttaaaatctgatacaggaataaaattcactttagttttatgaatacacatgaagtaattcctatcttttatctcaaagttttttcaacccagtaaagccatttaaaacttttttcccttcagattcatttgtgatgtcatttgttatatcagccccatgttaaaagagggctgatagtttccattagtgggcttatcatactttatataatgtttccttgtcgtattactttcaattcagctttcaaagttatctacaaagagttttcactttgactctgacttcacacagcaacaggataacttagtggctttcctctatattttaccattacaatgagtgaaaatagctgatagttagaaattgtttgatactgccaggaagaaaacatgtccagtgtccaatttccatactcatacttccattctcaagaatgtggcagtgaaggaatattctccttttagaattaagctggtctatattcaagccacggtgtgcatgatgtcagggatgtaccttacctgacaattgtgatccccttgttgggggtatttacaccttggaaccagcaaatactaaagatcaggactctcctatcaccccaaagagccatttgttaaacatttaccagcacagcacttgttcaagcacattgaatttatgttactttgctcaagatatttaacctcaagatatttagcctcattttctatctctataaaatagtggcaagctagtactctacctacatcactcatttttcaatttggatcacttttttttttgagacagagtctcgttctgttgcctaggctggagtgcaacagcgatctctgctcactgcaacctctgcctcctgggttcaggcgattctccctgcctcagcctcctgagtagctgggattacaggcacctgccaccgtgcccagctaatgttcatatttttagtagagacgaggttttgccatgttagccaggctggttttgagctcctgaactcaggtgatccatccacctgagcctcccaaagtgctgggattacaggggtgagccaccacgcccggccaataactcttaacatagtatggtacttagcatttggtgaatggccataataataatgagactgataaaaattatcatttcaaacacaaatagattgttaagtgttaatttataggactgctttcctcactgttagctaaatagcaagaggaacaagtttgcaaaacagtaggggaaacttcatctatctttaggtggaaatagtcttggtgagttttaacttactttggtttaattcagatctattttttgtatttatcagaaggcaaaccaccatgataaacagagagaggaggatgttttgcattttgttgcctgtttccttttgtttcttctcagcgagtaaaacagttctcgaaataagcatcaatgtttttttagcctgtatttttattccttctatcatcacaggcttatttacttgcatacagaatacaaatatttgtatatacatatatgtattattagtattgtatttattattgtagcaggttgaggaataaatgggaagtcagaaattgaagatacacaaggaagtcagcaattctagcccagcgaacacagcagcaagaacactgctcccctgaactctggggagctttcttatgtgtgttattttggtttctcctgtctttctccttgtaatgatcagtgatggaaatcagccagtgtggatattcttagagctgagatgctgagctgctttttattccctggcttgaggcttgaacgcacaaagtctccagggaagagtgggttggagtagctacctaaggagaaggaataagttaaatctctggggcctttggctataaagcaaaggaatacagagtaggctggtgtcggcctgcagatcagccctgaggctgatcagaaggggctctggtgaggttttctgacatatggagcagttggagaaatccggtgataaaaggaagaagggggtgtttcagtagcttgaggagaaggtaacaggcaagagaaaatcaaggatgcaggatgtgaaatcaaatgatggaactttctggcttaatgcagaccatctggctatcttatctttaaaccaatgatttctcagacatttttcatcttatatctacaatgaccacatgtccctgagtttttacgataggccagatttcaaatatttctgcccattgttaggctcttggtcccaaattgagattggaaaatatgatcattattcttacattccctcccccaacttctgttacctttgtcacaggcatttgaggcaagcccgtggaagcctccaactggttaacagcatcgttaggcagctgtccacagcagtgggtctcaaacctgaccgtgtatcagaatcatctggtgccatcagttaaaatactgctttctgtggcacctgcctcatccttctagccccagaaattcggattcatttggatgtgagagatcttcagattatttgtgtttttagcaggtgtcccatgtgctcatgagacgtgtgtcccttggggcaggtttttggaaatcagtgtgccaattagtgcctttcacatctttatctgatcattcaaacttcttacaacagggcttctcatacttgggctttgacttaacggtgatctttgaacttctgaaacttgatgataaatttgtgagtatgggttcttcagcagttcctgggagaggacctcagctttcatcaagctctcactggtggtaatgcccaaaacagttacaaacccaaggctgctcggtcagcaatatgaagaccatccaaaatgtggaagctacttttttcattgatctcagacttaactgccctcatgtttgttgtggttggttttttttttttttttttttttcatcttctgaaaactaatttctggctaaaattcacacacatatatgcatactgctatacccacccactggtgacttattcttaaaatgatgacttctttcagaccagtattttcagttttatcagccaataacacttaataggatgtgtgtgtgtgtttgtgtgtgtgtgtctgtgtgtgtctttgaagggtggctggctgtcggggtgggaagatctaattaggcctcactgttttctcaaccatcctctcttccctctctccctgactttccacatgcatcccccaaaacaggttctgagcctgtgataccatgaaaccccatctggtttaaaccttgggctaatattctgcagctgtgttgcctaagctgtagggagactttttccttgacaagcatttgtggtttagggagccaaacaattgattggaaacttcagggctatgagttctaactcttggtctgctctgacacagtgtgtgaccttgggcgattcatttgatctctgtccaaactctctgatgcttgataacaggattttctagaaatctccctgccagtaaagacatatggaaccactccttggtgccacaagggaaggctacacttcattatctctcaggcttttaactctctttctccatttgcccatctctccatgccagggactccatagttttttctaagtcttagaaacacgttcctacttttctttcccaaaatacatcagcaatgctactctatttcagtcatccccaggattttagactttgtccgtaaatatttatcccataatactaaattacccagactgctttggaacagggaattgtgcagaactggactctgcccttaatttcacatggctactgtaaataggagagctgcatttctctctcatttttctgtattctacaagtacaatttattgttttatgagcctccacaaatcattttatactccctcttctttttaacatctccttttatagaaaattattaagttaataaattttattaaaagcaatacaattccaagaatttttttgtagaaaatatgtactattttagcttttggacttcgttagaagattatttactcagataataatcttaaacttgccttttaagttttaggaatgatcacacacatgtgcacgcacatgcactcatacacacacatacacacacacacattccagtgtgtaatcaataattttttgggatggcatacgagagaattatgttttgtaagcttttataatgactggttcctcattttagaacaaggctgaagaaatagagttgtaaatatttctttcttactttcttctgctttctgcctcaagattctatgtctctctgggatactgggttttgatattttaatcactttatttctgttaatgttaattaagggttcttgggccaaaataccaagaagggtcagtatgtggttcatagtaaatcaatcaaatggacatgcgttaaacaggtcatgggctaatttctgttgtgtgtcatatgtcagacagtctctggcttggagtgatttactggttactcttcctggaaggagaacgttgcttccctggcacttccctccatctcctcccagtccacatggggctgagacagagcacccacctcaggcctcctcccccagtatcttcctcttgctctaggctatcctctcctctttctccaccaggaccttttttaggtaatcgccaaactggaaatggtttgataacctcatatctatatgttattatttctgtgaaaaggaagacgtatattaaagtaacagtaatagttaacacttatttttaactctgtgctagtcctttttacagtacttaacatgtaattttacatttaatcatcacaataaccatgtgaagatgtgtatgcttatatacctactatatattaatagatgaagaatgaaaaagcattaagccgattttcctagaatcacaggataagtgaaggcaatctgatttgagaccttgtgtgcttaattaactaatgtgctgataagctgcctttttgaaaaacagccaaatgcacctctatatgcggttttaaactgcgatggttagactcctatcacgagtagaactgctctttggataaaaggaaagtcgggagtgaggaaatcaagtaggtagggcccctgacttccctcctctgtctctgtaaaacgtttctgtgcaaacacacacacacacacacacacacacacacacacacacacgcacaccacaaacacgccaagctgagcagaccttcttttatctgttttcacaatggacttccaagtaatgtttcatttgaagagtttctctgtaaaaaacaaacacactttgaaaatgactgcctgctacaaccccacttatcatagtgcattcttatctttcccccccagttgaaaatgctgatgtaactcagatgttagctgaggtcatccttgtctctgaggtcactctgtcctttgagattgaaataaaattgcctcaatcccccatttcatatctcctaaaaggttccaatgccatcccccagatttctgcacattctcggacctattctcatgggtagttcttcctggcgaactcttgacctgactgcatcttacctcctccggctgcatttttctctgtgctccatgctgacctagacgtggaactcaatcctttttccttaacacgcaacccccttcatccccacttcactcccacagagaactgttcgtgaagattttcagggcagtaggtgaaggtttatatcccagcaaaacatttaaatagggtatcaggatccatgttcttaaaaattctgaagccactctgccactggaaggttcttcttgactgcattattacgccttaccaagttgggcacccctcactccctcacctcctcttcctcctcttccttctcctcctctttctttttctccttgccatccatcagttcaaaattcgtcttcatttcttcagtgaggctttgattgctgcttccttcttacccatgcctccttgagcctcacctcttttaccccaggcaactcattagggtatttttctaaacaaagacagttttctctccaggagaaactgtggtgcaaactattaaaataaatttattaagatgaaatcccccagcccctgcaacattaacacagtatagcggattggcggggtttaagcaggctgattagcaagccccatcagaagctaacttaaaccctcactgtagaacagtcagggtccatgtgcaggacaggtgaatgattgattgctttttccatgaacaatttattaggagtgattttaaaaaattaagcaattgctcagcatcaagcatggtgtgaagcacttcacattctttatttaattgaaattcacaccctgtgaagtacatatttgtattttcttttaactaatggtaaaagttaagcaatttacccaaaagtcacagcattagaaagtagtacagcctttgataggccctgcaaggaccctccttgttcttaactaccataccagggcattcaaccaccttgtggccaaaaggacgttcctttatctaaatgttccattctaccttccagcactccttgactcctcaggaagcttcccccagactctgtgttattttcctgcctttaaagagactttctttcttttttctttcttttctctcttttttttttggagatggagtctcactctgtcacccaggctggagtgcggtggtgtgatcttggctcactacaacctccgcctcccaggttcaagcgattctcctgcttcagcctcctgagcagctgtgactacaggcgtgtgcctaattttttttttttttgtatttttgggagaggtgaggtttcactgtgttaaccaggatggtctcgatctcttgacctcgtgatccacccgcctcagcctctcaaagtgctgggattataggcatgagccactgagcccggcccagagagactttcatagaattttaggagtatagctattttcagctttctcctgggaatgtgtgctttctgcaggattcaggaaagaatgaaatgtgctaagtaaacatttttacagacaataatgagaaaacttatggggaatgggttcttggggtcagacaaacacgggtccaaatcctagttctgggtcttattgtgtgtcctatgccaagttgcttatctttactgagcttccatttctgtataacatgcacaatcatacctgcttctctagctcagtgcttggcacacggaaaatgctcaataaatactagttcctttccccgtgcatgtctagttaaagttttcatatcagcatatttaccgagtatttgttcaaaacatcaagtagtttcaacactgcaagttgaaggaaggcaatatgatgaaaatgttttatttttccagttttccttatatttttatgtgcattgcaaaggtattgcaaagtgccaacaaggggaggccttttatcccactcctacttttggtgaagattgaaaggcatgtagacaaagaagaggatgtggagtcaagacccattgttactggtggaaggtgtccagattcttggtgttttgaagaaagaattagacaaaatgcacaaacaaagcaaggaaagaatgaagcaacaaaagcagagatgtattgaaaatgaaagtatgccccacagtgtgggagtggtcctgagcagccattcaagggctgtggatacagaatcttcttgggtccaaatacctgctagagctttcctattggccatttggtgttcatcccatgtaaatgaagtggtggcccacaatcagtctgattggttgtggaaagcaaccaatcagaggctgaagtgaagttacaaaggtcacattcctacgcaaacatctgattggttgtggaaagcaaccaatcagaggctaaaatgaagttacaaagttgcacttctgtgcaaacaaagacttggcccacaatcagtctgattggttgcagacagcaggctgaagtgaagtttcaaagttacactcctatgaaaatatctgattggttgcaaaaagcaaccaatcagaggtagtttcagtttcccatctgccttgcagaaaaggtgggggtttgcaaagggagtagcttctggtccttttgttacttaggcatggaaagttagggttttcctttcaatttagttctaggaagtcagtgtgaaacagccttaggttccctgcctccagacactattctcctgcctcaccatgacatgaaacttctctgccagggctaaatggcaggagggctctctaaatgtgtctggcaggaattgagtacagcattgacatcctcaaattgaaacatgtggcctgcatttatttgaatataacagttattgccttttggacttcgggtttcatgttatcaatgcttactatattgagtggttttatatttaaatgtattgtgcagtagggtccccccttatctgtagttttgctttgtgtaattttggttgctgaaatcaactctaattggaaaatatgatatgcaataagatattttgagagagagagaccatatccacatatctgttattacagtgtattgttataattgttctattttaataacctaaactttccactggggttttgggacatatcccccttggataaaggggactactgcaaatgttttgttgtttaaataggcttattgaaatgcaaggtgctcatcagaggtatgctaggcggttggatcatttagcaccagtccagtgatttgtcaaatgtctccctcaataaccatactcacaaaacatctacactgttctcgtttagaaccactggttttgtagctgtgattcagtaatcagagtatgccatttaaattgggggttcctgtcaggtgggacatctagatcaggccctctggccagatgagagcacactcaggaacgcctgccatcttgaatggaaagatctcacctgacgttgaatcctgctcttttcttaacaccaacaactgcaagtttaaatgaagtgtgtgtacaagataaaataatgttcctcctttcaggtttttaattatctctgaaagtggatagcattcaacgctttagaatttactcagtttttgggtgtgtgtgttttgttctgtgtgtgtgtgtgtgtgtgtgtgtgtgttttagatggagtctcactctgccacccaggctggagtgcagtggcacaatctcagctcactgcaacctgtgcctcccgtgttcaagcgattttcctgcctcagagtctctagtagctgggactacaggcgtgcaccaccacacccagctaattttttgtatttttggtagagatggggtttcaccatgttggccaggctggtctcaaactcctgacctcaggtgataggatttactctgtttcagcatcctcgttttacagcactggttcccaaatctcactgtccatcatgcctgccagactcttaggttcctcctcataggttctgactgagttaacttgggatggaatgcaggaaccctggcctttccaaagctccttcttgagtatttcagcgcagttcatgcctatctttcaaacagctacatacagccgacacttactaagcataatttatgtggtttgaaacaatgaatgatagagaaaaacctgtgtgctgctcttcaaggcatgtcagatctaaataatttagccagtcattagacatgacagaatctgtcacacagagtaagtaataaaccaggagtgagggtagatgctctccctgagagttgtcagagggtcaggggagactctcagatgaagagctttgaggaaagccttgaaagtagactctgagtttgcctcacagacaagaggcagagggcttttaggatatagcaatgaaaataatgtgtgtggatctcaaataatcctatgtggcaggaatagggggctggataacggcaggaggaggtggtcaattttgaaggccattatagagggagaatatgttactcgaggtcatgtcatctgtgagtaactgagatgggaataaagttaatttatttgagaaggggccagggaaagttattgttcagaattagtgatgagagttaatgactgcctcctctgtcaggtttatgtattaagaaataccagtttttaaatctatatgttttatccgtatgtaaattacatgtaactttttgcatatggataaattttatattacatgtaaaattaccctggaaggataatgttcatgactcttgaaaagatctgttaatccacaagaggagctcattttgtgacctgcagagttgcagtgagaagctacagggtttgaaaggagacattctaaatttttgaggccaatttcattggagaaataaaagcctagcacttcaggagagaacggttttggggattaccagcctgtattgccattgactcctgacttcttgcttcatgattttaaatttatactaaggcatggaacactcctcacttcctcctcaaccagccagagcgatcctacgctttgcgcctcccatcacttcctccaaactgttctttatgctacagggaaacctgtctcctgtgagctgctttctcatttcatctactatttctccttcagtgatgttccttagcacaaacccaaagtcttgtaataccagctacgtatgaagtcacaacacagagggaagcccctgccctgcttcccgttgaccctctggaagtggggaactgggtccttttcttcttcatccatggcttgattagttgacattataaaatacctgctatctgctcacagtcgcctgacccaatggagaacagagatgctatttcagaagaaagagcgaccaacagaaaggataagcagaaactaaaaaatagtaggacctctttttgtaatattgtttttggttaaaaaaaagattttgcctgtgcataatggaatattggaacttagatgctatcctatctcagtaaatggagaagagcactcttaggacatgagcataataaatgttaaaaaaacaaaaacatgaagtaactttttctgactaactgtatgccaataactttctgaatcctcatgacagaaagacaatatgatacatctcctgtcccccaaaagggctctcagtctaatagaaaaggtaaatttatagcaaatactttaaaagttgtataataaagtatattcaagattctgagctaacacagtggggatttataaactggtctgtgtgtctttgtgtttgtgtgtgtagatgtatatgagacccacacacggggtcgggggggtgggtgggagactcgttaattttgtacaaaaatcttatgatatgggtgtcagtatctctgtttatagattagaaaattgagactcagagtggctgtgtgatttgaccacatcatctagtacgtggttacttgacattcttacccaaatctttctgactgtaaagtccaaagttattttatttcatcctactgcttcctgtctccctaaccctgtgttctagaatgataggaaagaacaaacatatgaaaacaggagagagtatttgttttcatgagcactctattgtggcataaatgtattgcacagctttactttcagtgattctgtttttttttcagcattatttacgtgtaacaagaaaccatttagctttcagcatagactcctgatttgatttatgcttaataacaccctttcttcctaagcttggctgtgtatggacggttataagttttggatataaaatgcatcctgaataggagtgaagattaccatgtgacatttgtttttcctgccaccagctgtttagatttagtttcaccattcaacaaattcaacatttgatggttttcactcatcaaagaactaaatcagcagtttccctacaaattggtaaaagctagtcctttcatgatctgaaatcccgtgcctggattgggtctggataaccatagaggggaagaagtgatccatgtttagaccttactttttgaaatcaataaggtaatgccacagactgcttagatcggattctgcctgcagatgtccatgtctcctgagacataagggcagttccatctcaaaagcctgggtagggtttgacagaggtagctagaagaccactgagttaagattcccttgaccatggacaggctcctgtcttttctcataggacatagctagaaggctagaagaccactgagttgatattcccgtggtcatgaacaggctcctatcttttcttctaggaaaatagagatttacctcattgctacatggatttgaacttttacttttgataatccagggtcatccccaacttgatttttgaagttactgagttttttctttggactctgaccttaatccctgcagatgctcccaagccagagagccctctctaactcttctcctggaatgctagcgccccaggagcaggatctcatttcccacaagatctccagggcctggaaatggtgctttatacatactgtgtccaccataaatatgagtgggatgcatttggcacaggtggaccctcaggatgacctattcttgtttgacattgtctccctcatgggatggaagtcctgattctttcctgccctgtgtcagcatcattctgaagccttgataagctcaagccttgaaaagctgctggccttttgctggaaagtaagaattacggccttagacaatgggcctggcatgtggtgtataactagtaaatgccaaacctgcttctctgaatcttctgcctctgagtctccttaggtggtctgtgattgccatgggtggtggtattcaggcatctgttcctctgtactttatttattcatttttattttttagtccattttcatcatctgtactttattttccatttcctagtcactcaacatgaagacatactagatagacatgaaaaaggaatatggagttacccgaccagtttctttcttctgacttgcttgctgttctatgcctgagtaagaagaaaaagaatgttatgtatctgtttccatacagataatgtaaaaccatattcattcattcatttgttcaaaaaagatttgaatgtcaagtatatgtcagtcacacaagtagttgaaaatatgatttatttttcactacatcttcaaaatagagatttaaagtcttccatttagaatttttaagcaaaagagactagtatacaagttcacttgaaattgaagtgcatgagtattcttaagtgtcactagggttgcctaaatttagtgacctgtacatttcatgagtctggatacagactctattataaagaggtttttctttagctaattaaaaataaaagtcaagccatgttggttcatcttgagcttctagtggtaccacattcattatacacatatttatgggaacacaatatgtgcaaggcactatccctaggaggatagcttcaaaaactatgacagagagagagaagagaattgagtgatttataagagattcatcacatagcacaagataactatattataaaattggctagaggaggaattgtgtatatcttactcattctttttatcacctagtgaagatgctcagtaactttgcttctgagtttctgtacagacacttttaaataatatcgaaaccaaaagtgtctatatttttttctcttttaagtctattgaatacttagtattgaggatcaaaagaacatttctccttcattttttaagtaaaataaacattcactgatatatcctgcatgccaaaacacatttctttgcagaaagatgggcttacactgaaatgggctgacttgactcaggatttcgaacatattaaagtttgttcacaatgaactgacatgtagacaagtatttatatgaagtctcttgtcagtcagtgcatatgtcaaatcacctgcacttttagccaggaaagcgataccttttagcaggtgcttggtacaaaatcaagcaatcaggtcttatctttgaaaattataaccaaagagccagtcctcacctggccagaaagttgtttatgcaatgaatctcaagcaaaacccaccaattccaaagatttaaaggctcataaaggtagcttaggagatctgtgaaaggttcatgtcctatgtgaggaatacaatgtgtgtgattttctacgtatcttctggttttgcataaatatacatgcatatatatttaaaagttagcactgaatcaaatatttatcagacctttgcattacctataatacttgcatcataatattatttttagttctttattagagcaaatatatcattttatgcaatgatatgcttgttttaccttcttctgtccatcatgataaatatgaaattttatctctgaaaatatagggatcgtcatgctaacttgaggaaatgaaaagaatcactcttattctgattcttgcctctatagtcaaaatggcagagtgagtacacgtggaacacaaagcagggagtgcctctccatctacttggaacacagagagttggaggaaaaaaaacacttaaaaaatagagtttcactgataaagcagaatttaaaataaaaatttctgctgaacaaaaacacagtgaaaaaacacatggcgagctggcgctgaagtgcctggggcactgagacgggaaagagggagctaatctaacccttatcgtccaaaccccatgagacactaaatgcaacccaccgcggtgcatctcgagggctactgctctgtgtgatgtcaagggctgtggtagaaatgatgtggcccagagaggaatcagctacctgctcattccagtggattttccagtggtgcctccatgtgatcccacaggaactggaactatgatttcctcctggcaagatcccggacttctactataagacctggttctgcactgtagactgtggtgtcagggctgaggcaattgtcaaactatccactacaggtaggcaagtttagaaagagataaaaacaatgaagcaaaacaaaatttcctaggcaagaagagcttacaagcccaagttttaaaacgcgagggaatttaaggcagatagccagtgcacccaacaaatgggaagcattaacacctaaggaaatagacattatcatgcattgctcaagttatttgaaaattattttataaatctttgaaaagataaaaaaggaatgagtatccaaattaagtagtaaaaagagattgtcaagagaaagcaaattttttgaaattaatatgaatgaatacagccaataactcatcacaaatcttgtaaataaaattttcatacagtttaaatgtttgaaaaagactctaattaggagaataaataatagatcgaacgcagttgaagtgacagttaatgaaaatgggactgaggctgggtgcggtggctcacccctgcaatcccagcactttgggaggccgaggcaggtggatcacttaaggccaagagttcaagatcagcctggccaacatggtaaaaccctgtccctactaaaaatacaaaaattagctgggcatggtggccagtgcctgtagtcccagctacttgggaggctaagtcatgagactcacttgaacccaggaggcaaaggttgcagtgagccaagatcgcaccactgcactccagcctgggtgacagagcaagactctgtctccaaaaaagaaaaaaacaaaaaacaaaacaaaaaaaaacacatagggattgagtcaattacataaaatattgcagaaagaaaaagttggatatactatgaaagagaagagcatcaggggatgaactgagacatgaaatacaggaatttcagaagagtgaagaaaagacaatatacaacagatgacaacagctaagaagtttctagaactaaagaaagtcatgagttatcagccagaaaaaacattgaatgctaatcaaattaaattaacacaaaatagcaataagaatctctatataaacacattgtgttgaagctccaaataagggaatattttgaaacatttatttctttcagtcctgttgttgccagaacagaatctgtctgcattattgtctcttcttctgccactgagatctcctattaatctgtttttattgccaatatttattaaacgaaggggcaagttatcaaaatagccaaaagctgaattttgttttctcccaatcaatgtgtgaatgttaatcaccattgtgcagatacccaggtatcactggatgattcaagactgttgattccttcctaccttaactttggatttaagttactgtggacttaattgacctaaatattccacagccatattgtctccaggattccctggagttggcttgtgaatttttggcttgatctattctatgggatacgtggagcacagatattcagctgatatatacctatgtgatgtactggccagcattcaccacgactggttggtattccaaatctctattgctgcataacaaactacccctacattttggacacaaaatgataacatttattttgcttatgaatctgacatttggggagggctggatgaggccagcttgtctctgtttcacatgacattggctgaggtggctctaaagctgggggctggaattagctaaaggctccctcacatgactagtggttgatgctggctgttgactgggtcttcagctgaggctgtggccagaacccccttgacctctacatgtggctgcttggatttctcagagtatggaggctggcttccagggagaggtggggagggagtcaggtggaagctgtattgcctctgtctgagcctgcaatttacccagtgctgcttctacctcattctattcattaggaatgtgtcactaaggtaggcccacagtcaagggaagggaaactctttgatgtaaaagagtgacaaagaattttcagacattaaaagcactgtagtccttataaaggtgcctagaataagcaaattcttaaagacagtaaactagaggctgccaggaactagggcaggatgcacggggagcttgtgttttatgggtacagagtttctatttgggatgatgaaaaagttctggtagtgaagagtggtgatggttatataacattgtgaatgtattttgtacacttaaaatgcttaaaaggatacattttatgttatatatagtttaccacaatttaaaaagccatattgtctgcatccattctaattaatcatgcctattttggtcttaaaattttttaaatggtccttttggatacatgtatgtccccaaaatattcagaaagatatccctaacccctcctttcccggcaaggatttcacaaaggcagaaggaaatattactagtgaaaggagtggtgacttttgctgtgtgctcctggggctaaaagatctagaaaagtttgggaataagctattaccaattttatttcatgagcaacccgaaaggggagctacttttaatatgcggggatgactgatgaagctcatgtttcccatttatgtttgatgaactcataattttgtttccctccagggaaaactcactaaaatatgtaaaagggaaatcataatggagattttcaacttctcaattcagcttcatctttctgtttgctgggaatgggaaaagccagatatccttatggctcacagagtgacactgggacttggtgagaatgtgctaagactgaccacctagtgaatagaaggtcctttggtgtcttgccacacaaggcagcctcccctgaaacattgaaatctaatatcttgcatcaaggagaggtatggctgaggcataggaaccaggatctctaaaggaagaaagaagtgtttgataggaaacggggaggaccccttgaccccagacactagggtagttccttgatttaaaacatctttttgatatttgttgttaattctttaacatcagatcctagtcagcaaactactagaacacatggctctctagactgagaaaactggctacccccacttcagcgtgatggtcctctggtaggaacaccacagcttagtctctccatgttttgcttctaactgagaacctggacagatgctgtcatgtatttacctctcttgtttcttagttttataaaagtgatcatactcacacattaactaattggttattatgctaacagcatgaaatatgcttctttgagattataatatggtgattggaagattttttagtatgaaaggtttagaaggcataacgtttctatacaatcagccaatgtggaaggaaagctttgggctcagtaacacagtgtttcttctaatgacttgtacagagtatttgtaagtacttgattgcattattatctgtcctgatactggttgaaatttttagaagaggctatagggtgtgtatttgagcatatgtggtgcattttatctgaactacttatgatttcagctaatttgccacaaaagagctccctcctgtcagtccctgtttctgtagcttacctctgttgaacagtaagttgcttttagagtgcagggttactagccactgccttcaaatatccggcacttgttttggtggcaggtttgtaaacacagtgccttggctgtgaggtgtgttgtaaaacataggcaattaattactactagttaagtgaattcaagtggtttatttttttaaaaattgagcagattcaagctttttgctttaataatattactcttatttgcattctgaaatgcttccttgatgaaagagagtaggtgaagctctggctggatcactctcatgagagtgtagtctgcaggcagaggtcatctatcctgtgcatattaaagaattctagttaatctcagcgctttacatggcttgtatttgcttttgaaaaaatctgaagacagaaatgactgaacacatgttccaaggtgttaaaagcttgattagggtgctgccagaaacattctgacttttctgcttagtatgaggagaagacccagtacccaagaataatatgaatttgtcctttctgcctttggggatttgctccatccttgtgtgcaaagtgctataggggccagtaagggaggaaaggagcagggtgtatattaggaaaatgatgtagtagggatgcaatgcctgtgatgtcagattgccttctggaggtgtgatggggataaacaggtcatgactgggtgaaggagagggagtaatagggtacgtcagaaatgatgtaggtgggacgtgtgctgcaaggcaaaggcattagaaaggcttgaaatccaaggaaagaaatttaagaacccatccagtacctctaatctaattattctacctggccctgctgaaatcagagaaaccaaagaaaactgattggaaaacactttatttaaatagaaatctcacgctattgagattgaattgggtgaacagtgggatgacttgaagtttagaggatgaagttgattactcagcaaatagttttctgtggcatcttgtgcagaatgcagaatttatatcatttggccaggttccccttttgtcctcttgtatgctatactatctgtttatagcccaaattttacttattagtactccttgtaggtctgtctcccgggctagatcgtaaactgtgatggcaggaccacatctgcctaatttaccgctacattcccagtatagcgcccagcaaaaaaatcagttctaattaaatattggcaaaagaggaagtataacacagaagaaatgccacaatatctcacagcagatgaacttgagtttaaattccagttctattaccagataagaattgacttatcaaatatctaacttgagacggtcacatcaattactatgattttcaatttatttgcttgtaaaagaaaggtaataatatatgctttttcagattttttttttttttttttgagaaggagtcatgctcttgtcacccaggctggagtgcagtggcgcgatcttggctcattgcaacctccacttcgtgggttcaagcaattctcctgcctcaccctcctgagtagctgggattacaggattaccatgccgtctaattttttttttttttttcagtagagacggggtttcgccacattggccagtctgttctcgaactcctgacctcaggtgatccgcccacctcggcctcccaaagtgctgggattacaggcgtgagccactgcgtctggcttgctttttcagaatgttgtaagaattaaactcactgtctgtaaaggatgtcattcagtttctggttcttagtcgatactcaataaatgctttttattatttatagtaataattttaaagtcatctttctctgtctcttgcttgattggttagagaagactaatggaattagaaagctatgaagattcagcatcatggtgtttgaatagtatgcaagaaagtgtaaactatccttaaggcacttgctagaactcatttcagaaagacataaaacaattcttgcaccttcttaatgaatccttccctcagacttctggtggctgccttttcctcttaaacccagcaagtcagaaaaatcaaacaatgaaactaaaaaagttaaatctaaccatgggaagtgaaataaatatttacacatggcttccataagcatgatatatgtttatacctttagtatgttttgatttgtgtatcttaccacctcaagatataagcatttagcagctggaaaccttatcctggatatattttgtattgtactttattgtatctaataactgtcagagcccaccaataaatatactacacttagtgtagatacatgcatggctaattcaacaagcattcttatctaaaattttgtgtttttacttggctgctgtattggtagacttgaagactcagccacagctgtcctgagaggctatctataaaagtgcaggtgttcagcattagcaaatatttcttattatatggattgacttttggcagctagtaacgatgtttcctgagattgaaaaatgattttctaccttaaacagtggtttcacattactggaatgctgaattaaaaaacacatacacatgcacacacacaccccccacaaaattcttctcatcaagtagtaccgaaactgtttttgttagttgtatacatttcatgatttgtatattttatagtagaatgcaagtctttctttttaactgttgtggttaggtttaggtcctttgccaaatgaagcagactatgaagaattaggaagcgtaatgcatcctggggttgtgttcctggtaaaggggacttggacctggctggaagccaaggaaggacctggggctggagatattttcaagactttaaaactatcaggacattttggtgttttactattggagacttttttgcatcaacagatattaacaaatagccttttatccctgtttacaagaagttcaaatacccttcgtgatatctctcttccccttcttaaccttaaagtcacaagtgggcagagtctgaggaccttgtttcaaatgatttatgggaagctgagaaatccctccctctgcagtcccttcatttcctatatacacaccaaataataaaaccaaaggataagacatttggcttggtatctgttaatttctacattaaatctagaaattatagtttttctgtattctataaagcaaaagactaaaaattgaaagtaaagggcagagacattttccttttggaacattatcgaaaaaatatgaagatcatttgcagtgggttaatgaagtttgcatttaatgcctgagctcttcactgcttgcctgagagtttgccaaaccaacagagaaattagtttggctaaataaataaatgacaagagggcactcttgggtgcggtggggttggataattgaatccaacttaagtatggctggttctgttaccctaataattttccttactttggcaacacattgctgatgttttggaatctttacaaggcaggtaagccttcagatcgaggaaaaccaaacaaaccaatgtcaattatttgagctaagctctactttgacacacttgagttatggcccatggcaggaaaattcaaaaatgttccatgtgtaaaggtttcccctttatcatcttaccttctctgtccttcaggtcttcgcaggagagtgcgtttcaggtttttgttgaacttatgaaaggctcagtttcaaaggcttgggttttcacatccatgtcaatatcacagattgaaatgtgacacgggtacctggctgcatactttctttaaacgtgagccagttataccacaaaacgttaggggaggcactctttcatctcacactttaaagtgaggtttgttgatgtaacccaatttccagtctgcagaggtcactctgtaatgtagtgcgatgatgataaacccatcaatcctgtttgatgtttgaatttcccttcccgtggtctttacctccactttgttttgtaaagtaagtttggtaatagtgatattctggcttgccaacgtctgatgatctgaattcccctgacactcactggctttttaaagcatgcacatgcttttgcagagattatgccgtggatataattatgaaggggataatagaaataaatgtttttatatactttcgatgatgttcttgggaagaataagtgatcaaatgcagagatactaaaccttggttcctggccctcctgtgacctctgaaagtagtgaaagttcttctgtattctgtaaagtgtttggcagttggtatgaaatgagttggtggtctcagcagtctctgtatgattgtgggtgtgtgggcatgaactgagggtaaggagaaggaagggaatggacaagaaccagtattagctggaggaagggcatgatataactcctgtgacatgctcagtccacagaaccttaagtagaaggctgcactatatttactggtccctgtcctaagttaagaggcagaatcagggatgaacaagggactaaagcctgttatttggaatactggaaggtaagagtcagttgagaaccaggccagtgaaatacaggttgaaacatattaaagtgccagtatttggccatttatgatttacaaaaacatgtgattcagtgtttccatttcattggatttcatgtgattcaacctgattctgcatgcagtagccgaattggtttttttctgtttgtttagaaacacccacctcaccgcctccttgctcatggaaagccagggttatagtgagggcaatatggtcgaattagcagctgcccattgtgacaaatggttgtttttgttgactggtcccttctggcaaggggcggcaaaaaaacaaaaacaaaaccagaaaaagacaccttattcaaattattgtgttggaggtgactggaagctccattagctcatcacttttcctccagttaaaccatctggattataattacttgccactttgcaaagatctgtattactggcagtggcacaactctttttagtgatatttttcagtgtgaacttcctggctaggtacagcctcctctaagacctatgggcatcagaatatgaggtatattgcaagataagaagaaattagactggtattaataatataagtccctttcaagtgacttgaagctctctgtgttgattttaggaccttgtcaagatgagccaaaccgtgatggatcctagtagagtacctccaccattgattcagctgtgcaatttgggcagtcacataacttctctgcttaacatttttccagtgcagtagaaccatttcagaggtctggaaactatagtgtgaagtgccgggttcctctgagttgcttttggatggtgctagggaggagaggggagtcctcttagttgagcctggacttcccacacctcttacgtttttgtcccattcaacaagaacacctctgtcttttgttttgtatctgaagaaagagttcaatgctaaaaggaaaacatttgaaaacaagtggatcaaaaaaatctctaggccttctcctagctcatttgaatttttcttctctaaatatcagaatgtacaatctgacgatatatgccagtacaatggaaggaggctaattttcttcctttccaggcatccctactgaggcccgtaaaatggaaacatctgtccttctggaaatactaggaagggaggaagctttcacccttcctgccagccccctcccaaaggaaaggggggacttatctgattgcctaactggggagagtagctgactttctatggctcagccccctggggcttgctttctgtcagcccagtttgcctgcgggcaggacatgttcttctttccctttgtgctaatcttactgggcaagctgtgcgtctgcctctggaaaacctgtcgtttgggatgggtgcgggaaggtaggaagtctgatcgtgacctcagatactagccacattctctggtccaggtttactagtaataaagatgatagattgatccctaactgactcctgcatcagcttctctgtaagttctgaaactataggaggggggaaagatggcggaggtttcctgggagaaactctgacaaataaatccttattccttggcagttcattattgatttcccccatatagcgaacaccctgtctcctgatcttgatctgtcttaaagtgccttccatgtccagattaagatcctgtccccttgaatgttctctctccttactgcctctctggttctgggctgtgcccacagctacccctcaatcactgctttctggattatggagccactcactactgatcatgcttttgcttttcctcacattgcctctgcatttcagctttgattcacaaccctgtgggccaccatgggtggatctatgtttcacaagaaaggtgtcaattttttaaacttcctacagctgtgtttgttgatcccaagaaaccatgcagggtgttcagcccaggttaatgagcagtcggctcacccacaggcactctctgctcagggatgctaagccctttcatctctggatttcatcactcttagaactgtcaggcagttgccagctattagggagccatgctattagggagtttggcagctcctcgaattccgtgtgcaggaggaagctcctgtcattcctcgtctcctcatttcctttgtgggcagaccctgtgtgatgcttgccgtcaccgaaacttgccctcctcagactggcttatggggtttacccgagttgctttgcgagcccagcctcctgtccgcacctgggtccacgggcaaggcagatcttgcaccttccctcaaccgcactgtggctgtgtttctgtgtcaggtgttctccagtgcttacagcatgatacatttcaacatgcttcccctgctggtcccttcttcctgcccgctgcaggccttttaatctcatgagtcaacatcgctctgtagagcaggtgctgctgttctgtacccccatctgctatctcctgctccttttcctttgttagtcagcacctacctcgcggggagagacactgaactgctggtggctgttacatgggctgcatcttaactccacaccttccgtccttttggctgctctgcctaaaatgtcctcatcgctcttagggagttggacaaggagatcagagcctcattgttctagagagcaagtgagaggacagtcctagaagaacaccagagcctggtgctgtgggccgtggctcttttctgtctcccaggctggaatgtggtgtgggagggcccaccatgtacaaagggccggggactaagtggacatgaaataaacatatcagggcttgcctctcttgtgtactcctcagttcacaccacatgagcaatatctattcaattgcttgcaaagaaggccatctgttccaacatttttcctaccctacttccctgaagcactgtggattcatcctcctcagaaagacactacctttctgctaatactcatttaaatacacgctcatggtagaccacagacacctggtccagtatagactggattcagattggaggaggcagacctttggtatagaagcctggcaaggaatctctaggtcatatcagtctcgatatcaaacacctgggatccagtgggatccgagggtagatctgggtctactgcacagtgaagaggaacaggtgggaggtcagcttctctgccaatcaagctggggttcaggctcaggctctattcgcagtggtaactgtctcacaaggcagttccaattacaacttccacgttttcatcctgagcttagaccccatgtctcagttccagacatggatatctaactgcctcttttcatctccattgggatactggatgtgcaggtatttcagttaccacattttcaagactgaactctagtcccccttttcatcttcaccactaccagatacccccaacaagattttctcaagtctatccttatctcaatgaatgaccccaccagccagccatttgctcaagcaagaatcctagcaatggcccacatataatataacttcttcttccccacatataatataactctattatggctttcccaacataaagctcaaatgcttccaattctctgtgaccatactagttcaaggccccgttatgcttcacttgggactcctcatagcctccttattagtctttccacttctacccttttctatctattatctattttctatctgtttttcagaaagcagccacttttgtaaaaatgtaatttaaatagctgggttttttttctttgtttaaaacccatcaatgccttctcagtgaaattaaaacaaaatcaaaatgcacttcttcctgtgtcctacaagaccaagtgctgcagggtctggtctctgtttagctaactcatatctgtcctcccttctctgcaccactcactggcttcatttctatcatttttactgggctagtgctttcctgttcaggaccttcacgcagcagaatttatttcttctcccgggccagtctttcccagtctttgcacggcaggttactttcatccttgaagtttttaatttattgtcacctccacaaacaggccttccccaactacccaatctaaccaggtcacctcttcctcttgttctctgtctttgtaccatatcatttttctttttggtgtttatctcagtggatcattctgtatttgtttagtgctttaattcactaaactcgaggaggcaggtgcaattttgttcagcatctagtaagtacagggcctcccactcaatgaatatctgttgcatgaatgaatcagggtgagcaggatgctgctgctgattcagaaatcaggcatacctgccagcagaattagtgtagtgggcaaatccagaccgctgtgctctgtacacactggctagagttcagtgaagctgggctgggtacacctgagtgtcacaggccttcagcacatgcagcttgacagggcaaagcaggaacagataatatcagggccctcagcacctgtggccattttttactgggggctggaaaagtaactgaaagtctctaacattaaatcactattatatcaaggcacttgaaggatatcaaagaatattgggaaatatatcaaacttacctgtgtatttggtaggggagagacaaacacaaatatctaaggggtcactttcagactactatgccttgtttgtcattgaagtcatcatactgcatttcaggagaatgtactcaatcagaatatattaggttggtgcaaaagtactactgatactatcagatactccataggaaattgctggtcaaattatcggtgaaaagcagttgacttattattcttattgaatatatgagcaaaaacctttctaaaatgatgttctgagacaagccctatcatatatccagctttaatgttaggacagtgagacacgtagaagttaggcccctcagccaggcgcagtggctcacgcatgtactcccagcagtttgggaggccaaggtgggtggatcacctgaggtcaggagttggagaccagcctggctaacatggtgaaaccctgtctctatttaaactacaaaaattagccaggcatgggggtgggcacctgtaatcccagctactcggtaggctgaggcaggagaatcgcttgagcccaggaagtggagattgcagtgagcagagattgagccactgcactccagaaaaaaaaaaaaaagttagaccacttgcccaagttcacatagccaccaagtaggagatcctgactgtaaacccagtcattggtgtataatcttcattattaccttatgagtaaacccacagctatcctacatcccgcacattccttgaacattgattcaatcccttcaaaaagcgcagatgcatattcacaactatcagaagatgggtataaaaaatatactttactgttactgctgtaatgcaaagactacaaaagtctagaaaagcgttttaactgtaataaaatatttaaagtatagaacattatgaagatgaaactaataatcatctcgtcctaccaacaaagtcaatgatgattaatatttcagtgtactttccctaagatttttctgtatatatatacatacataattagcagtcattatatctttttgcatatttaagcatctatttatattttaataattttagttttatcacatcactgatatttttatgtattagtcttccacaaagttttagtagattttaaatatttgattatatagatgcatgctatttggcctgtttccttattgtcatatatttaaattgcttccagttgttttcaggtatataccttttgaacacagtacgtagttgtgagttgaattgtgtgttccccaaaagatacgttgaagtcctaacccctggcacctgtgtctggtacctgtgaatgtgagctcacttggaaatagagtgtttgcagatgtaattgagtttacacaaggtcatagttgattagggttggccctaaatccaatgactggtgtccttacaaggagagcgtttttgtccttacaaggaaacatagccacagacactgtgtggaagatggccctgtgaaggtgaaggcaggaatcgaagtgttattgctactttatttcatttcagctacaagtatgccaaggatggcctgcaactaccaggggctagaaagagaccaggtgggatttttcttcagagccttcagagggagcacgggcctcccagcaccttgattttggacttctagaactgtgggaggatacatttttgtgttttaagccgcctagtttgaggcaatttgttacagcagctctaggaaactaatataatgagaatattttgttctttgaacaaatttatgaaacttttttcttaaaaacttaagagagctattcttatttgttatcattactaatataattggtctaaaacttctttcactaatttattgttttttaaatggttacttaggtttccatttttgagctttttctttgcttatattttctctggtgttttgaaatctgtacgttttactacctttccatttttcaaaatattttttttcctatgttttttaattgtcagaattaagattcaaacagcagtatttgagatgcctgtgcttgagatcagaagtcaagcaaatttaatttttgtcttctttgccactttttacctcttacaatgtaataatagtatgtcacatttactgagtaggtaccatgcccccgtgatagtctttacatgtcacacctctgctttacagatggggggggaaggattgagagattatgtaacttgccctaagttactagataacctttgcatagccactgcttctgtgatctctagcactatgctatcaggccttctaaataaactctggggtggtagacttaattatttaggatattttctatattaattctatcttctattttcagatttcttttggacattttattttgttattaaagatagattgattgttggtttaattggttgaatagctgatttctaaatctgtgtagtacatagagacataatggtattaatatgtatatgaggctcttgctcaaactaaaggcgtcttccttcccaagaccaagagtaattttcagttattcaaaaattgtccatatggtagaaatttcagaatgccaagagacggagagatcaaagagtcacttactattttcttactcttaaatttattcattattaacctgtaatatattggttatttattgctgcataacaaattatcccaaaatgtaatgacttaaagcaaacatttattatctcctagtttttgtgtcaggaacctgagcatggcttagttggatggctctgcctaaggcctttcagaagactgcagttgacatgctggcctaggctgcattcccatctgaaggttcaaatggggggaatttgaaatcagggttcatttcctcataagatgttggactaagggcctcagttctgcacaggctcttggatggaggcctctctcagttccttgccacgtgggtatctcagttttgcaggtgacaacatgacagcaggagtcctcagggcaaggaagagaaagagggctgagacagaagccaatcatcttgtaagtgacattatgctacctctaccacattctattcattagaaggggataactaaattcaatctgtgctcaaagggggggattacacagtagtgtgtaccaggacatgcagactattggaggccatcttagaggcctgaaacatgttggtttcagctctctgctcttgtaacttctaagcagggttgaataatctgagatcatttagaggaatccaacactaaaggtttggtccgctccctgtgtatatgttttgtagggtgtgttttacctcctcttataatctgttaggcagaaataattggcagtgatcccatggacatgttttagccaactttcagcaataaatcagatactcctccattttcatttggtatttagtgttgcaaaggatattgctaagaataatcaaaatttgttgcctcatattgcagaatttgatgactttttcactcaactttgtacttttttattttaagttctagggtacatctgcaggatgtgcaggtttgttgcacaggtaaatgtgtgccatggtgatttgctgcatctatcaacccatcacctaggtattaagccagcatgcattagctatttttcctaatgttgtccctcctcccaccctaaccctcaataggcagcagtgtgtgttgttcccctccctgtgtccatgtgttctcattgctcagcttccacctataaacaagaacataatgttgtttggttttctcatcctgcattagtttgctgaggataatggcttccagctccattcatgtccctgcaaaaggacatgatctcgttcctttttatggctgcatagtattccatggtgtatatgtaccacattttctttatctgctctatcattggtgggcatttgggttgatttcatgtctttgctattgtgaatagtgctgcaatgaaaatatgtgtgcatgtattcccattcctaccaacagtgtaaaagcattcctatctctctgcacttcaccagcatctgttgtttcttggcttcttaataatcaccattccaactggtgtgaaattgtatttcattgtggttttaatttgcacttctctaatgatcagtgatgttaatctttttttcatgtttcttggccacatgaatgtcttcttttgagaagtgtctgttcatgtcctttgcccactttttaatggttttttttttcttgtgaatttgtttaaattccttgtagattctggatattagacctttgtcagaagaatagattgcaaaaactttgtactttttaaaggttatcatcatgtgcctaggcatgcatttttttcactggttttcctgtgaaccactaagctgtgaaccattgaaactgcttacacatgactttcttcatctcatagaatttttttaatcttttatctttgattgttgctactttctttaatttcattcttttcttcagaaacatcattcagcctcaacttggttttatgggttttatcatctgtagctctcatttccttcttcctgcttagttcttttctttgtattctaaggaaacttctgtgcttaccaccgcatttttgtttgagtttatgcgtcattgattctgcccttccttcaatgcatattttaattctaataatggggttttagtgccattgcaattattttttcattttgtcatcactcattttatttcatctttgtatctttttacctccacctgttctttccttaagattatttgatcccatcctagatccttgactttttgtcctcattgaagaagccagatgttttcatgaaatttctactcagtcctgaaataaatgaatgttatgaagtcttttattcttccctattttctggatgctatttcttattcctttttgggcaaatcattttctccatgttggttttccttttacttatcttcaaacaagtgttcagtttcagtatttttcagtaaataaggaagctaaactgtcctttataccctgaggttgaattactttcttagttttgcatgtggagggcagattcatttattcacccattttctaacaggcataaattatagtgcacctctattctatcaacagaacaacttactcctgccctgccttcttatttctctggtttgatgaactgattgaatacatgaaaaaatacatttgtgatatcaaggttatgtctatctccatcttcaaagctgtactattctacctctaggatctccctccaccttcatgtttactactcagtggctttctggtttttggtctgtgtctgaaaatagaatggtatagagacagatgcatctcagcctagctccaattatctaatagctattgcacattttcctaaattcagacatagtctgttgatattagttttaggtttattttagtattttttctgtcttcatggatatttgaacaagaagttgggggaattgcactggttgcttccaccaaacattattttgaaagaaaaatctgtattgctataataatactttccctctccgatctgtttgctacagtgctgcctaaagatctttgtaaagggcatagatcatgtcccctccatcttaaagcaccttaatgaccttcttatccaaactcccttcttgtggaatatttgatcttcagaacctcatgtctgttttattctggagatctgcctctttcctcacactctgttctaactctccaggctttgaccactggcttttcccttacctattatatcctttcctcccagtttgtcttgaaaatgcctgttcactttttaggactcagcttcagcttcatctctaccatgaagaggagacttaatgatttcatctttgtatctctgttgggcaccatgcataagttagtctcagcacctctctgtccttattacttttacttgaccatggctgggcaaaggaagtttctagtttacctctgattccccagatcctggtctagcacctggcatatattaaatgcattttaaaatggtggactattcaaagaacacttgaatgtgtaactacatttcttttttcttctggtaaaataaaaaagggttgaatatgggattagttcttttctttagttcttcttatctcttaaggacttaatacccaattcttgagcttattattttttttccaaaataaaaacttcttgtcctttgaaaatttatagcatgttatgaatttattgtccattacttctactctgtgacagttgtatacatcaaccctcctatcaggaaaaatggcttagtaagctagctgactcttgaatggacattccgacgtgtatttaaaaagctgacttcagtgaccccatctccttttccctccctttcagtttcttctctcctctcttctggaattgttctgattgcctgggagctgcctggtcagctgcaggaggtcctaatcctcacccagataggctgtgaatctctgagggaaccacttggacctttgggtgtcttatttttaatccctgaaaaacattttgacttggttcattgtgttgtttcacatgaaatccatctattaagtagcagaaaaatagtattgtttttctcttcttgaaagctaaatttagtttctgtggaaatgattttgttgccgctaacagtattgcggactcctgtgtgacacagtagcaagtacatatcagctgttaagaaacaaagatcttgctttcctactggagacatatggttaaaaccacaacaacaacaattaaaaaaaaaaaggataccaaaaggatattttgcatacatagaaagaagtcaagagaattagttttaagtaatatatcacttactttcccataaggtatcaatatctcacaaacactgaatagcattgatccaatttttaaaattttgatgttaaattaagatgctagttactttagcaacagggagatggatagagtacattagagagtgagaactagtcttttgctgttgtcacttatgagaatgaaaaggataagaagagctcaggggaaaaaaaaagttcatttctaattgcagtgcaacccacaagcttgcacatcctataacgagaaagctccttgttagctgccaaaatctgccatccaatctgtctagtagttgatttcgttattacattttgatgtgcccttgacaagctttagcacacaaaaactcaacacctcctcctaagctcctccggtaccagaaagatcatgaagggatgacaaaggcctgtgcttggctttttattattcacatagctagaatgtttataaacagaacagagtgtaacgagagcaaatgctcaaccacatcaagtggttcccgtgtcttgcatgtcatttaaatatcgatttaatctcgtcctgcactatatgcttcacacacacaaagacccaaaccaagtgcctgaaaactgtccctaggggctttcaaaatgtggacaaacaactctcttttctttggataattgtgatgccttgttccaccactttgggtctatagcatctggtgtttctgaaatcatctttagatgtcactgtgatctctttggtcagcactggtccactatctgtcccctaactcaaccttacagatttacgtctgcacacagattcaagtgggggaaaatagacaatacaattagagggaattgaattaaattattaatttcatgaaatatattataaaccttagaacaacttaggcgaaaggcaattaaaacaaccaatgccttgatgccttaacaaatataattataggctaggtgactataattataggcaatatcacttttggaggctgaggcggggcatcatttgagctctgaagttcaagaccagcctggacagcatagcgagaccctgtttctacaaaaaatcaaaaaattagctgagtgcggtggcgtgtgcctttagtcccagctcctcaggaggctgaggtgggagaatcacttgaacccaggaggtcaggcctgcagtgagccataattgtgccaatgtactctagcttggattatagagggagatcctgtctcaaaaaaaaattaaaaattaaaaaaatttatataattatatcctctctccctctcgctcttttccattcactagtgttaatgtgctataaatgtactggctgggtttcactgaaaaggttataacctgctccttgggagtaaaatactgctttcagcattattcttagctacactaaacttcataggaaagcagaattctctcccctactctgacaaagttttactttgcaaacttgtccactggtaaccttgagtgttatggaggcgtcagttacaaagctgatgacccactctgagccaggatattctttaatgccagggacagtgattgtcctgcttacagagggtcaagatgatcacaatatgtgagtaattactatttttggcaaggtcaggggaggggtaggggacagtggtgaaatcaaaaatgttcagtttaccacaatcataaaaatatatgccaggagatacatttcaagaactgtattaaaccacaacaataaacttttttttggccatatccaatggagaatacttttaaatccatgtatatgcttaatttcttgtattctgtgccatactactgatgttttaggttgtaggctatattgagcttcctgtctcattatatttgccaaaaacatattgcctttggaaaaataagttgttaaataatagaaggaaggagccgagaggggcaagagaattaacaattattgactaccttctatagccagatagtcataattgtttgttgttttacatatgctatacaatttaatataataatcataatatagatctctttaagataagaatgatccatatttcccagataaggaaaagataaagcaagattaagtaacattcccagagtcacacagctagtattttaaaatcttggtcagtcttaagtcaaaatcatgcttattatcatagcatcttttttttttttaatagacaagatgtctgaacaccgagatttgaccctaacacactaattctcccaggaaaaatgtgtacctcaaagggatattccaaagtttgccttacttaagcaacaacagattgaaactatttgtggatatagtactaataattctggtagaaatatgatgagaagcaaatagatccactagctagaggtagccggtttgcatttgagattaggttattctttcttgttttaaaaagtgtaattaaaccaactgtcctaagaaaactcttccttctgtcccacatgtaaccaattccagatgtgaaactgattccctacaataattggttagtgttttactttcttaaaacctactccttgacctttcttaaaacctactcctctctcaaactcatttagatgctagtttccagactgaaatcaaatttggaccctaaaatgaggaatgtctgcaaacagaattccaatttaatttgcactgttctcgaaacattagaagttgaagggaaggaaagaatgatgatctcccgagggccagagatccaaccccactctttggtgtgttcctgtggtttagcccctcttccaggcaagaccctcaactggggctttcttggcttggagtcattttgctgcagttaacatttagttcacacatcattagatgaagccctggttacagagatacactgctcttgtcatagcagaagtatgctgcatgcacctgcagtttgaagtttttgttgagggaatagactgaaatgaatgaaaagattgaaaccgtttacttttttgtgactccacctgctgtggtgtatttttgttggacagaataactggaggtgtgtttatagcttcagggaaaggatacattaggggttacatgattttaaggtgatttttttttctttaaagctataaatcaaatttccatgaaaacagttatatgtatataactgctatagaatttgtggagatatatatgtatctattatgcttcttttccccttggtgagtaagaaaggaataatttcctttgttgttgtcatcccagaagtaatttttccatggtagtggtatgtcagtaccatatctgtgctgtatttgagattgacaataatgtcaatcgatgctagcctatcatatctacaaacttataattattagattctgttttaagtgtctttcagaacgcatatactgtatcaagtgctcagtcaggccctgtaacatttaattagtaatctcgtgaggtagatttttttttgagacggagtcctactctgttgcccgggctggagtgcagtggcgcaatctctgtcgcccgggctggggtgcaatggcgcagtctcggctcactgcaacctctgcctcccgggttcaagcgattctcctgcctcagcctcccaagtagctgggattacaggcacccgccactaggcccagctaattttttgtatttttagtggagacggggtttcgccatgttggccacgctgatcttgatctcctgacctcgtgattcacccaccttggcctcccaaagtgctggaattacaggcctgagccactgcgcccggccatgaagtagattttataatccccattttctagatgaaggacctaacgtgaaagaagataaatgtctggctgaagcttttgcagctcttcagtgatggagctgggatgataacctcagtcagacaccaaatctagtgatccatgacacaacagtaccaaggaaaactcttagagggaattgaattaaattattaatttcatgaaatataaaccttagaacaacttaggtgaaagggaattaaaacaaccaaagcctctaatgacagtgaaacacattattcctttattgtatcaagtcttcgattaagccatttttgtccatgaattctaggccttctgtctgttggcatttatgttgttaatctctgaatatttacaagtcagcatgaatatatgatgtataacctcgttattgaggagtctcaactctgagatagaggcatgaaatggtcttggttttttccagttattgtttcaactctgttatgttgaaccccttccccctttccgtctcttaatttcctattgagatgactccataagtttctggttattttaatatgagacctaatattattataatcccaaactcggcttaaagtcctatctttttcccatttaaggggcagatctgtcctggctctgatttcccttctcctcatcctcatcaagacctagatccttatctgcgggtcagggaactagcaaaggcagatactctcttgtgttactctggttacaggcggtaggggaagtgtccctggctgtactccgatttgatctagttctgtctgatgctatggacacttcatttaaggtgaatgtgttttgagtgatgaattgtcttgggataggcttacaattatttgagtcccctttgttgtgagtactttctcacagagaggctgtttagttttcctttggcatttccagccgtaaaatcccacacccctcacagggtggggtagcctcatgcctggcctggtggcttcttgtgtaacccatggcttttgcctggctcttcctctccatgtgtcatcacataagccaagaaagctacagaaaatttcttctgttctttgagggcccggggaaactggagtggtgtggagtttgactcatttcattcctaggaacagtactctatttgtccctacaagacctgttggcatggctgctccagtgaggctctcatttctggaagtttctagtctgggagcagtcactagtctctgcttatgaatgcactcacacttctgggaatggattaggcaggctttctctgatgttatagggatctaatatgcaggacagatcaactcccaaaattatgcttaaccgaacaatgatactttattatcccatagtttccctgggtcagaaattctaaagaaatggctgggcagttctatttcagggtttctcatgaggtcacagttagatgtcatgtggaggtgtagtcatctgaaggttttattggggctggaggatctgcttccaaggtagctcacttccatggctggcatcctggggctcactatgggcagaaagtctcagctcctctccatgcgtgcctattagtagagctgcctgagcgtcctcatgacatgatgctggcttcctcccagaatatgtgagccaagagaccaaggcaaaagctgcatgtgttttgtgacctcagctcataagtcacaaactgtcacttctgtcctgttctagtagtcacatagagtagccctaattcagtgtgaaaatgggctacacagatatatgaataccaacaggattcttgtgggtcatattgcaggctggttaccacagtgggccttcaggtttctgaaacttaactaaatgaaaaacaaaacagcaggaaaaagaagccaatccacccttcttgcatgcagtcccaatttctaaccagtgactcactgagagccctcgaatttacttgacttggggtgagggacaccatcactttctcctccttagatatactctactactctactatacaatagtgtacagtatagtacactacactgtgagtgggagccaacaactcatttctcttctcttcttgttcctctccttattaaactagagaggaaatgtggagttatggttggtgtgtgaggccactacatctaagtaatttttttgaagacgtctccaacttccattataagacacatgatggatgtaatattggttacagtgacagctgctataacaaattaacaccaaaatttgaatggcatattcaccttcagtttataggtttctcacgtaaagttttctaactgggaggattgctctatatagtcattgaggctgagagaggctctcccatattcaatatgaggtaatgtctccttgacattgatatacagccagtgaaatggggtaaggcagagagtatgggaagtttgttattgttgttgtttgagatggagtcttgctctgtcacccaggctggagtgcagtggcatgatctcggctcgctgcaacctctgcctcccaggttgaagcaattctcctgcctcagcctcccaagtagctggaattacaggtgcccaccaccatgtctggctaatttttgtatttttagtagagacggggtttcaccatgttggtcaggctggtctcgaactcctgatctcgtgatctgcccgcctcggcctcccaaagtgctgggattacaggcttgagccaccgtgcccagccaggaggtttttatagtaagcttggcctgaacttgcactcatcagttctcagacctctttggctttgatgatctgtcttcctctctgctactacctgttggaaattcattcaggcgggcataccttagatgtaatcactgccaacatcacaacagagttgtgccacctcagaaaactttgtttgataaaaacaacccagtctctgacttcctctgtttacctcacttactctgattctgcctttccaagaactctcccactaatctacagctgtacctgttttcagttcctcaccattctccttgtgccctcacctctctgtctactggcctggattcccgtcccagcattataaccttcttgccacccctgtcccttcattgtacatgactgggaaccccctgaggctggttaaaaccaactgtctacttggcgccacacctgtatttgtgctcttgaacattgtcagtgaaaaaacatgcaactttactcactggactcgttacaaatttacaaccaaaagtgtgaaatgggtgctccacactgcatagatggactagaggactcactttcttattgtctaagatgttcatttcacaccttctccagtctcttcttaaatgtttttagctaatgacctcaatctataattcttagagataattgataaaattagtcaataactactttaacttctcattgctcatcatgttacactgaaaagtgattcctgcccctaaaaccaaccgcttcagtttttttcttagatcctgtcttttgtaccttctgaaagattcagttaccattatcccctttctgtcttgcatcatcaactttttcctctctgccagatcatccccactggcaaataaacatactgtaatataattcgtcttaaaatgaaaaacaaatccccttaatttggtccttctttcaagtgccaccccatttcttggctttttttcacagaaaaactacttgaaaacattcttcaaattcactaattcacaaattcaccctaaattttcccctctcatttctttttcagtctgctgaaattggaatttgactcctacaactctactaaaagctttcaaccagatccccattgatctatgtcttgtcagtgccaatagttaagcccctcctatactcagcctctcagcagccaccctggttacatgtttcttctgaaacatggtcttttcaggctttctgcaacacaacatcctcttggatttccttcttcttggtcttctttgctggcttctttttctctaccatgttttacatgttagtgcttcagccataccctctctcctgatgacctcatccagtttgagttttttaaatcactgatacacagatatctctaaattgttctcgccagctcagtctgcaactaaggtccagacctttaaatctaactgccaaactggtatctctactagaattcgtaactctaaactgacatgcaaaacagagctgtttgtttttgtcaaacgtatctcccccttgccccaaagcaagcttttctcttttcagcaaatggtgccatcaaaggcctagtttcttaagctaacatccaaagaatgtccttgaggtttgtgagattttttatttttgtccattgacaagtcctgttggttcaacctccaaattatagtcctaattcaactctttcttaccagctctgttgctgaaacctagcctgcactgtgtcaccagtttggtctacttcaagagccacctcactcgtctcctcacatcctctgttctcctcctatagcccatcctccccacatagaagtcagactgctattttaaagatgagatcatgttatttctctgcttagaatcatccaatcgcttttattatcataggcttcaaggtctacctgaccagaccctgcctagtcctctaaccccaggcccctcctctctccctccttgttcactgtgcttctgccacattggccttccttttgggaccttgaacctgccaagctcatccctatcacagaaacattgcacataactatttttttgatttggaatgctctttctccagggagttgtgtggcattctcctcctctttcaggtctcatttcatatactgcctcctcaagaaatcttgcatgactatagaagctaaagaacttccactttgcatcatagcgctctatttaattttctttctagccgtactgggacctgaaatgatctcaacatattttatattttcatgttaccttttaaaaaaattaatacttataatcatgctctaatacttaagctccttgaagacaaatcctttttcgtttgcttcttgtgatatgtctagtgccaggaacggagcttccctcagagtgggtgctaataaatatttgctgaatgaatgactaactctcgtaatttcaggcatttcaattataactgagaattcaatgtgacagtcattagtatagcagcaatcttgttttctatatgtagaaaacaggcaggtttagtactttaaatgacattattaaaaatgttagcatactgtccagctaatggcagcacattagtaaactattttatcttcatactgcaatgaagaattatttccctctttcatgaaggtaaataaagaattgatcagtcttatggactttgtttaatttttaattaagggtaattctttttaaatagctattttaactttttcttgcttactaatgtaatacatgtatatttcaaaaaaaaaatctggaaagtctgggaaaaatagttatgtgaatgtattattcactcttaaagccatccagagaaaagtatttctgacattttggtgtatttctttctctcgttggtctccatctctgtccctgtctctgtctctttgtcttcttttctcactatattcaccaaattactttgtggtgtatgtgtgtgtgtgtgtgtgtgtgtgtgtgtgtgtgtgtatcattacttaaaggtttatttctcccaccccaagtctctcttggagatcctctgtgatggggtggtctcttgtatgttcctaaattaatccatcccgtaggcatgaccagtaacctgtttctagtactctgcccacctgctggttgtcccttagatcctctcaattgtatttatctgaaaataagcgtgcttcaattccacccagtcccatgcacaggaattgtgtctggtagaaccttgttcttcgaagggtaatccatggcccagcagtgttggcatcacctagaggtttattagaaatgcaaattcttgatttccaccttttatggtttaaattatgtcccaccaaaattcacatattgaagtcctatccctaatacctcagaatatgaccttattgggagataaactctttacaggggtaatcaagttaaagttaggtcactggggggagggcctaatccatgtgactattgtccttataaaaagggaaaatttggacacagagaatgcatagaggggagatggccatctacaagccaagtagagaggcctggaacagattcttctcttaacgtcctcagaaggaaccgatcctgccaacaccatgattttcgatttctaccctctaaagttgtaagacaatatatttttgtttttaaagccactccacttgcagtattttgttatagcagtcctggcaaaccaatgtaacactgcaaagctatgaattggaatctgtagtttaagaaaatctccaggtgatttttatgcatgttaaggtttggaaacatggagctagagtgctttacagagcaagtcagggaaatctaactcaaatagtcattaacaataaacagaatttattgcactggctcaatctggatgcatgctagggtcacctggggagcttttaaaaatcataatgccaggagcataacccagaccacttaagaaagaatctctggaaatggatcctaggtatcagtaagcttccctgaagaacggaatgagcaaacagagatgagaactgctgatttactgatgtatgtaactgaaacaaagtcctccactgaataactgggaacaagcatcttcacttatttaacattagattatgctaaatgtgcaatgatgcttataatcttttaaatttaattaaaatctttttctggagctgggcacggtggctcacacctgtaatcccagcactttgggaggccgaggcgggcagatcacgaggtcaggagatcgagaccatcctggctaacacggtgaaaccccgtctctattaaaaatacaaaaaattagctgggcatgatgggaagtgcctgtagtcccagctgctcgggaggctgaggcaggagaatggcgtgaacccgggaggcgtagcttgcagtaagctgagattgcgccactgcactccagcctgggagacagtgagagactctgtctcaaaaaaaaaaaaaaaaaatctttttctgtgtcatttttatggcgatctaattttttcttatatgtccactgtaattattttactaatgctgtattattgaacaccctggggaatatagatacataaggctgggccaagaaagtgaactttacaaagcaaatttacaagtaccggccaggctggatgtggtggctcaggcctgtaatcccagcattttgggaggctgaggcgggcggatcacctgaggtcaggagtttgagaccagcctggctaacatggtgaaaccctgtcgctactaaaaatacaaaaagaattagccaagcattgtggcgtgcgcctgcaatcccagctactcgggaggctgaggcaggagaattgcttgaactcaggaggtggaggttgcagtgagccaagattccagcctgggcgacaaaagtgaaactctatctcaaaaaataaataaataaataaataaataaataaataaataaataaataaagtactggctcaagagagaagagaaaaaccaggaaaatccagcatgagtgaagccaagtgaaaacaccgttttaagaagaaggcagttttcaagggtggtgagaactaaagagaagtgaagtaagagaaaggaataaaagtttccactagtttgagcattccagaagccattgtagggaaagaattactctctatagagtggggaccaaaaccattttgcagcaggttgaggagtggggattggggaacggaggcagtgagtgaagacaagtcttttaagagtctaggtaggatagggagaagataaggtgggagcacaggatgtgacagcaaggttcttatttattttgaaatttaatgtattttattttttaataggtgtgccggtaagtataaatgctgaggttgataattcagataatgagaagaaatatatacttatatataatggtatatacttatatatgcaggcttatatactggtggatataagcctctgtatagggtagagagaataggatttgatcgacagtttgaggaaaagagccttgaatgggagaactgcttcttgtggccggaaggaaagaagaaagaagggagggctgggtgcggtggctcatgcctgtaatcccagcactttgggaggctgaatcatggggtcaggagatcgagaccatcctggccaacatggtgaaaccctgtctctactaaaaatacaaaaattagctgggtgtggtggcacatgcctgtaatcccagctactcgggaggctgaggcgggagtatcacttttacctgggaggcggaggttgcagtgagccacgatcacaccttgcactccagcctggtgacagagcaagactctgtctcaagaaagaaaggaaggaaggaaggaaggaaggaaggaaggaaggaaagaaagaaagtagggttataggttagtttttttttttttttttttttttttggtgggtggacaggatatttagggattttctgcttcatgttttccatttttcccagggactggtaaacaagaatgttttcaaagaatgaagaaggaagtagtgggcggatagtgggaagaccaatgatatgaacaagctactgtgtggaatggaaaaaaggaaagccagccagggaaaccaagagtgtgttctgcttagtgctgaagatccagtgacttcagatataatacatttatgttccatgtgttcgtatgatttcccccaacactgcataggaaaggacaagtctgataattagattggttcaaagtcataggcttacttgacgggtacaacataaagaagaagtggacacaacagattaatatcaagaaagatgttaaagtgatggatcatggactcgcaacttgaaagataagaaagtgctcatgggagcactttgcgaggctgagcatgaggattgcttgagcccaggagtttgagaccagccttggcaacatagtgagacctcgtctctactaaaattagatgtggggttgcacgcctgtgatcccagctacttgggaggctgaggtagggggatcatttaagcctgggaggtcaaggctgtatggttgtgccactgcattccagtctagatgacacagctagatcctatctcaaaaaaaaaaaaaaaaatgctcattgggacaacaaaatgaatgaaaggactgatgatttctaatgagatagaaaacattttatgtgtctatttagttgattgtatggtttttgtttttaactctgttaatttaattaattatatttattgatttgcatatgttaagccaatcttgcatcctaggaataaagcctacctgatcatggtgtattaactttttgatgtgctggagttggtttgccaatattttgctgaggatctttgtgtctatgttcatcggggtgttggcctgtagttttctttgtctgttgtgtctttgccagtgtttggtatcaagatgatgctggcttcatagaatgagttagggaggagtctctcctcggttttctggaatagtttcagtagaattggtactagcttttctttgtatgtctggtagaattcgactatgaatctacatctggcccagggcttttttttttttttggtaggtttttaattacgaattcagtttcagaactcgatattggtctgtttagggtttcagtttcttcctggttcaatcttgggagactgtgtatttccagtaatttattcatttcctctagattttttagtttgtatgcacagagatgttcctaatagtctctgaggatcttttgtatttctgcagcattagttgtaatgtcacctttgttgtttctgattgtgtttatttggatgttttctttgttaatctagccagtagtctactgatcttgtttatcctttcaaagaaccaattttttgtttagtcaaccctttgtatggatttgtgggtctcaatttttttcagaaagcaactgagaaaaaattataaggatattatatttgataccaagaaacctgatattcataaaattagaacattatataatcataattaaagcaattatttaatcacagtttcagtgctcattgctaatcttcttaaaactgagatttcatacttgagttaatttgcatttgtcagaatataaatggtacatctttaattaaattcttttacagtatgatatattggtgaatggtattgactgagtcctttcacatcttagaatgtttctgtgctgtcttcacatatgcagtgcagtttgagttcagaattttaaaattatttctttcaaacaactccgaggtatttaatggttttctgccattcattgcttcattcatctttatttttattttattcctttgtagataatcttctaatttatatatgaatagttgtagattcattatatgtaactgaagtatttaccaaaatatttttgtcttggggatcttttcattgattcattctctaaaacagaattttctttaagaaaagtcaactttggagacttctgctcccagaaaagcagaataaatatttgtacttttctctattccttctgctaagtaaaaacgaaaactctagatattatatatgaaacaaacataagaagactctaaaaagtaaagagaaaaagacagactggttagacatctcaagacccaagaagcaataggatggtcagttcttttggacttatatattccagagttagagctaaagaaggtggcaatctggaaaccctaataggccatggacaatgaaagctccaagaacaccaaaagacaaggaaaggggcagcctcacaagacaaaaatattttagacaataactgctgtactctagccaaacaccactgaaaaactgtgaactcacccccagtcactctaaagccaagttgggagcctagacttctacccttgtcagggtataatgagacactccaacccccctgacagggtgttcagagaaggccaaataaagaactaggactttcatctctgccaggctgagaccacatagggaggctggaattttccctctactcagtagtagcaaggcccccttctgtgatgtcggtgccacatgaggaataggacaaagattttttgccccttccattcagggcaattttaagtggagacctactgggaagccagaactcccactcctacctagtgatgagtggtttcctcctctccagaaggtctaacataggccaaatggggaacctagacttctactctaacctgccagtacaggggtggctgtattgaagcagagttagatgaagccagctaaaacagaaggtttaaataaggtccagagtcacataacataatacccaaattgtgtaagcttcaaaaaaaaaaaaaaaaaaaaaattactcatccaaccaagaactaggaatatctcaaattcaatgaaaacagacactcaatagatgccaacagagatgctagaattatatgacaaatattttaaagcagccataattaaaatacttcaagcaattataaatatgcttgaaagaaatgaaaatatagaaaatctcagcaaagaaatggaaagtctcagcaaagaaatagaagatctaaaaaagaatcaaatggacattttagaactgaaaaatacaataaccaaaaaaaaaaccaccccaaaacaaaaaaaccctcaacttaatggtggatttaacagcagaatgaagggaaccaagaaaagaatcagtaaacttgaagatagaacaaaataaatcacccttaatggacgacagatagaaaatagactagaaaaaaagaaataagcagagctttggggacctgtgggatctaacagccctgttactggagaccaggaaagatagaagaaaaagaataggtggaaaaagtactagaaaaaatttgatgaaaagctcaccaaatttgttaagagacatagttgtagagattcaagaagtggagcacaccctaaacaaaaacttaaagaaattcatgccaaaatacatcataatactgaaaactaaaaactaaagacacagaaaaaaatattgaaaacaactaaagaaaaataacacctttcctacagaggaaatacaatttgaatgccagtagctttctcatcagacatcatggaagctacgaggaaactgcactccagcctgggtgacacaggagactccatctcaaaaaaaaaaaaaaaaaaaaaaaagaagaagaagaagaagagtttcatatcagtaatctaagatctttcttacttcaagaacctagaaaaagcagagcaaaataaaacagaaagagaaggaaggtattaataaaggtaaaagcagaaatcagtgaaattcaaagcagaaagccaagaaagaaaatcaatgaaacaaagggctggttttatgaaaagaccaataaaattgacaaaccttttcaaagactgacaaacttaaaaaggagaaagaacgtactaatgtcagaaataaaacaggatattactacagaccttgcagacatcaaaaggataataaagatatactacgaacaactatacacacataaatctgacattaaaaaaattttttttagagtcattgtcttgccatgttgctcaagccgtcctcaaactcctaggcttgaccagtccttctgcctcagcctcttgagtggctgtgcctgacttaaatttgacaacttagatggaattggcctcctttcaaaaatgcaaaatactacaactcactcaatattaaacacataatataaatagccttacaattattaataaaattgaggtcaaaattttaaaactcccccaaaagaaaccttcaagcccagatgattgcaagggaacattttaccaatgttaaaaaaaacaaaaaaacccaccaattttacacaaacctctagaaattaaaagaggacagagcacttccagttcattttatgaacagacaaggcagtacacaaaagaaagctacagaccattatccatcatgaatatagaagcaaaaatacttaaaatattagcaaatggaatttggcaatatataaaaataattatataccatgactaaattgggtttattccagggtgcaagttacaatgcttgaaaaccaaatgttatctatgtcttgctcagattttgataggaattgtgtgaaacccgtatatcaatttggagagaattggcacttttcatctgttgagtctttcaatctgtgggacaccatggatccatcatattaacaggctaaagatgaacaaccatataatcatgtcagtcaatgaagaaaaagcatttgacaaaaatgaaacactcattcattataagactctcggaaaagtataaacaaaggaaaactttgtcaacttgaaaaagagcatctacaaagttctggaagttctagcctccacaacaaggcagtgaaaggaaataaaagatatgtgaattggaaaggtagaaaataaaatggtctttgtttacaaatgacataatttactgaatacttctagaactaaagattgagttcaacaagttagggggtgcatgttaaacacatcaaaatcaattgtatgtctatatactagcagtgtacatgtggacaccaaaattaaatatgcagtaccatttacattctctcaaggataaaaatgaaatagatgtaaacctaacaaaacatatatagcacttgtatgttacaaactacaaatgctggtgaatcaaatatacttttaaagtggagatatactgtattcataaattagaagataatataggaaagatgtcatgtctccaaattcatatataagtttcatggaattcctgtcaaaatccaagcaaaacataaacaagcttattctaaatgttttatttagaggcaaaggatctagtccagcttaaacaattttgaaaatgaagattaggaaagtaggaattcgtctacttggtttcaagacttattttatagctacagtaaacaagattgtatacagagaacagatagacacatagatcagtgaacagaagagagaacccagaaatagatccccacaaatatacccaattgatttttgacaaaggtgcaaaagcaattcagtagggagagagaacctttttaacaaatggtgctggagaaattggacatccataggcaatacaaaacacaaaacaaaaaacctaacctaagtttcacatcctatacaaaaatttactcaaaatacatcacaaattttaagtagaaatatctttaggatctgggttaagcaaagagatcttaagagttgacatcagaccacagtctgtaaaaggaaaaatggtgaattgaatttcatcaaaattaagaactttcctctgtgagatactttattaagagatgaaaagacaagttacagaatgtaataagaagaaacaaactattgatacctgcagtgacttgtatggatcaccagggaattatgcccagagaaaaagacaatcccagtaggttacatatgataagattccttttatatgtacattcttgaaataacaaaattatagaaatggaaactagatgagtggttgctaggatttaaggagaaggtgaggacagaaaggaagtggatgtgggtgtcaaagggcaacatgaaggatccctgtggttatgggactgtggtgatggaatatatctttactctatcaatgtcaacatcctcactgtgagactgaacaatagttttacaagatgttaccattgaaggaaactgcataatggttatgtcggagctctgtattatttcttacaactgcatgtgaatctacaatcatctcaaaataaaaatttcaataattttaatttcatttaggtatagtttacatacaataaaatgcctccttttcgtgtgtacaatttgatgagttttgataaatgtataaatgataaatgtgttggtgtgtacccaccaccacaatcccccaagcaggctccctcatgcccttttgtaggcgatcttccctcatcccagaccttggcaacctgcaatatgccactgtaaattagtttgtgttttccagaatttcagtatttacttttaaaccacaatatttagatctctatcaatatcagtaatattttcttcaataacttataactagttttgttccatttgtctttgtttcttatttggaaaattctattttgtttagattaaaatttggaatctccatcctccatgtctgttatcttctttctcatgttgttttcatttctttgtttctttcttctatgtatcaggagaacttctcatctttgccccttaatcactgatttgatcttctgtagagtgatgtgtctgttactctcaccaacatggattctaatgctgctctgtgctaagtatttcttataaaccacctgtgggctctgctcctctctttgctgctctgactctaacttcccgtggcctttcatcatttagtttcttcttctgtggatgctatttcatctctttgccaaaactccctctgaaccactgagtcacttcctctatttaaatcttgcctcaaagccttcttttccttttttatttatttatgaatgaaactctctgtgaggagttttgtggttctatttaagggcgctatgtaaagctgaagagtattatataaccatccataaaatgtctctgactgaagtacaacatacaaatggaggctgtacaattcataaacttcttttatagtcacctatcacttaataaatatgaggggactaactgcattacatttttttcatgaacaaaaaccagtctttgaaacaaaattgcctatgctttggagccgattctatctttcatggtctaaaatttatgcattgtgactttgtactgttggagatcaataattcttccctcaattatacaaagggtttttgctaccttaaaagatattccagatatctagaaaccttttctacgacccaaactcattttctgtcaaagccacttaataacaaacaggcactacaacaataacaacaagaaaactagccacagactttacacttttaaaagctctgttaaaatgaggattgatccgattaaagattaagcatattatgcaagaaaaaaatgtaaaaggcttaaactaggagtccattctttggttttttcaaagaacaggtttgttattgttaaagtaccaagtactatttcttcttggaaggtataaattttataaaaggagtggctacataaaatggagacttttactataggatacacagtctgtggaaagtttcattaccttgtagtgcaagctccctattgcagtttattgccaaatctgatgcttcacttcagagaaatagagctggttggtgccaataatggcagaagaataagtcctttaaggatgggcagggatttcagttcaaaatggcatcatattcacattttatgaaatgtccttccctggctctctactgaaatactcatgaagacatttaaaaaggcaaaacagttatgaaaaccaaagacagttgtgaaccatttaacagctacagaggaattctcaccaaccacagcaggaaagaacctggacggggaccaaaaattgtggccccggcatgtgtgcctccacttccgaaaaagagcctcatccatgaaaaataaaacagtaaaataaataaaaataaattgggaaatgtataaaaatgactctagttcacaagtagaaatgaagaaatccagacagtctggtttttttgtttttgtttttgtctttttttagaggaaaggttggtatagaaatagttttctgtttaagtacatagcaatattagaatgtatatcaatgatagtaaagaactatagaaaatcaagtcagtgatttaggagacaaagatgagaagttctgccgtccatgatgcagaaggtggaggtgagtgctgtatattaggaaagtttttgattgaacctagtctacttagaaggtggagtaagatcattaagaatataaattagagtatgactctagagttgaaaagagaatctctcctcctgttagataattatatgtaatattatatatgtatttctaaaatcttttttttttttttttgagacagagtttcactctgttgcctgggctggagtgtagtggtgtgatcttggctcactgcaacctccgcctcttgggttcaagcaattctcctgcctcagctccccaagtagctgggattacaggcacgtgccactatgcccagctaatttttgtatttttagtagagacggggtttccatgttggccagtctagtctcaaactcctgacctcaggtgatctgcccgcctcggcctcccgaagtgctggggttacaggcgtgagtcaccacgcctgaccaatttctcaaatcttctaatgtgtaatcacatatgtataaaatatatgttgcctatatgcatatatatttgtatgtgtagaaaatgtggtgtgttttagaaggagaatgagtagttaactgtgcaagtttagttatgctaggctcagagagagacaaaagcacaacactgaggcctggattaatagaagcacatcgtgctaaaagaaacgtctagtgaggccacttaagctacagctgggggtcagaagtgatgtctaagatgaaggaggtatgggagttgggcaaaaagagtcagggaaattgctccatgcagaggtgctttcggctgcaaatgcctggagctggaaaagcatcaggaacggggagacatccaatatggatcaaacacagaatgagcagtaagagttcggagacagaggtgtcagaatggagaggactgctgggagatggggctggaaagcaaggaaggggtaagtgacacaattcagaagtatcatgtcaaggagttttgatgtaattctttgaacaacagtggagaaatatgaacaagtatagacaagaaagatgtctgtggccgcagtcagattggagaggagtcagggagaccagtgaggtggctgaggctagtcacatctggaaagcagataaaaatgagtaataccaaatatataattaacagtagctggtaattgattagatttggatggggttggggagatgtgggagccggaaacaggaggcattgacacataatgatatgaccaaaagctctggactgaacagtgctaggcttactttgtaagcatcatcagtcttctcatctagcaaagggactgattaaaaaacttacttcatggagttattgttaaatttagataaaatagcatatagagtatgcttggaaacagtatagaattgaaatatggctactattacttttctaacaattattactttatcatcagggcaacaagtgaaatatgttttatgagatcttgcatcttgatcttttgccaatatatgttttcaattcatgggctaaataggaaaagtatataccagatcctgcataatgtttacttgggtgttactcatcgaagcagagacacaccaaggagaaaaatcccttgcggttttgttttttgttttttttttttttttgagatggagcctcactctgttgcccgggctggagtgcagtggcaaaatcttggctcactgcaacttccgcctcccgggttcaagcgattctcctgcctcagcctcctgagtagctgggattacaggcatgcaccaccacactgggctaatttttgtatttttagtagagacggggtttcaccatgttggccagagtggtctcgaactcctgacgtcaggtgatcctcccaccttggcctcccaaagtgctgagattacaggcatgagccaccacgcctggcctattcccttgtgttttgaagtttactattttgtttcttcacacaaaaattgttataaaaaccaaacatacaaatgcaaactttcagaatgacgtgtgtgtgtgtgtgtgtgtgtgtgtgtgtgtgtgtgtgtggtgtataaagggtcatactctaacatgccatgccatgaagtgcccacataagtcattcacctcccatgtgagttttctaaatgttccgaaacgtatgtatggaaaaataagctggcccaatcagtgttttcacatttacctctaactctacagcttttatcattgcacagcctgcatcccaacaggcaacagttataacaaatgtttcaccactgcataataaaggtaatcctgtttccaaacagaaagagttggaacctcacagccagatgtcctatctctttcattcggccaactctacattttaggacgtgttctctaaagcaccccttcttggttcaaaaaatgaggagttctgtcagccgtaagtgatagaacacttagctaacagtggtataaaaacagggtttattttaatcactcaccaaagtggtaggaagttgccaacattaatttacttacccaacagtgtcataagggacctgagctgtttgcttgttttcattccacaatcctctgctgtcagcttttcaccctcatgcatgtcacatccctgctgtaagatagctacctcaaccccagacatcatgttcatagcagaaactgggaggaaggtgctgtgtgatgaactctctttctacctgctccttttataagacagcttcctcagtagactcctgtttatgtctcactggtcagaacgagttccatgcccacttctggctacaagagaggctaataagaacgttcatatcttgcttttaaaagatctctatagcaggagtcagtcaaaagagaatggggttggaaatgacgttgggttagtagctgtatctattgctacataatatacccccaaatgtagtggctttaaacaaaataagtgtttcttatttttcacagtttctgtgggtctgaaattcagaagcaatcttgggtgatcttgactgttacatgttggcctgggctgcactcatctgaaggtttggactggggttgcaggtgctgcttccaaagtggcccagggacatggctggccagcttgacctggctattagtggtcagcttcagtttctccccagtaaacctctccacagggcacagccgctggcttcctccagagaaaatgattcaagatatcaaagcagaagctgtaataccttttatgacctgttctcagaggtcagacatccttacttctgcagtattttattgaaaacagaggtcatccctgttcagtatagagggacatcaaaggcatagctagtaggaagcaaggatcattggttgccgtcgtggagactggctaccatagcagcaaagatctaaggtgctgctcctattttatctcctctctcactcggcattggttttttgcactcatagtaacatttttacagcttttcatgctccctgtccatgagcaggaatgagtgaatatatgatgaaggaagaagatccttgatctaaagctatttttagttgtcaaaaaacaattacccatacttccctttttcaccagaaaaatccctctgaactacccagccaccaaaagaaagaaaagagtacacagtggggtgtgaatggcaattcatactttcccttcctgggcaaatttgttggaacccaaaaataaataaataaataagccagacatcactgagtgatttttaacaaaatcataagcaaaattccactataataacatagaatgaatggtatgaattgtttttccagtagtgaactattcatatagtatatctagatgagacataagggcaaggaactgtaacattttgaatacagttttgtgctttagggcagatattttttcctacatgaagaaaatataggtaatttgattcagtgaatctcacactgtaaccaatttggtttgtttgccctgggcttttagaacagtcctttcactactattgcgaagtgttattaaaagcaaacaacaaacaaagaaacccgtggcaaataaataaataaatagaaaacttagccacttcagctcataattttgaagttccttctggttgactttggtagccacctatagttcaagatagtggtgaccaagaattattcaaatcagagactagacataagagtactttgcagagcccaggccacccttctgaagggttcaggccattgggcttcccatattcttatgcctcattctcttttatgtgaaggtacaaacgtctctgtagtatgtctacccagttcacatatcttgacactaaattcactgagaaaggagcatttctaatatccattatgctgaagaacaaggcccctagtgtttatcaatcttgaagatagctgaaagctatcttgtgaaaactgtatctggagttggccttttgtttaagattttttccatgctagcccaccattcctggagtgtgtatccctgataagaacagatgaccagctcaaaggtgtacattaaaatgaacacttgcagatacattactgatctatgctggagtgtcttaaggctacaatctcatgacaacctctctctgactaggcaagtttgcatcctaccagaaacaactcccctcatttatgccagtctcttgaatgaagtcaagagcctctatttataataaatagtactctagacaacctttcccactttgctgctgttctgctggctggatgcagagaataccttttctggcatggacaatagaagagagctagttgataaaatagtgatattccattaacattggaaaatttatgattaaaaaagcccacatgtagaaggtagagtcctgagtccaaggctaaattgctcaggaactaaaatttagtttgtctttattaaaatcctcctcccttttccagatctcatttgctatcctgtgattgatcctcttattcacaccagtattctctcatgatgagaatttcatatccagtctacacaataccttaactgaaagctacttaccatactgcagcatttgtgtcatgatatagaaagatatgctgtttgatttttttaaggcattgttgctaatgcatggccctccatcctaaattaaatggttagatgaaagaaaatgtaatgtcatattttggacccttcagctttttaaggaacaagtccacaaaaggtcatatcttaatcttcacagaaggtttattttgcagagaaatgcaatcctttttctcaggcagaatagggaggaaggatttactatcagaatcacctaaataaatagagcttgtttttaactttttggtttggtaatagatggatttcttttaaaaaatcgaagtcagctgtttaacacctgcaaaagattcaggatatattatgttcaataagtgctaactttttaaaagaggcaaaaattcagcaaatagaaacaaaaaaatctcagtacaataaatgttagcatctgagaatctctctttggcttattcatgagtgttacttagaagtctgtctgaggctcattaggccatttaaaatcacaggtctatccatgtgtagaccaaatgtttaagaaaggattacacacccacaaaagaagtaaaagaaaaataaaaggcctgaagactgtgccttgaaagtcccagggtgcattctcttgtcaaaaggtaattatactctactcacctccccacccaaggatataactacttgttccatgaagttttacaggaggaaaaaaatctcatattttacattggtacaatcctaatctggaggaaattatgaaatttataactgggaatcacatatcccctattctgcattttctatgctccctttgattatggtgaccatagttaccatatgcaaatcaggcatgtgtggccaatgtagtcatgatcattctacctggggttggcagtcttctaaagtagtagtacagtaggtgaggctctaggggcagtcatgagtaatgagatgaagcaccatgtccacacttaacattaggaaaattcatgcactttaaacctgaacaaaattgtaagtgcgagcatgtttccactagcaatggacaactgaagacttcctctggaatattaacttcaaaacatcctgatcctcatttataatacacctcagatactgggaaccatggggtttgtgatatcgtgaaatatataggacatttagtctttctctaaagaaaaccctaaaagccggaatctccagtgattagtgtgtcttttttatgctaatgagacagcatgactcattagatagtagtgattggcagcccctatacagtttagaatgagtttggttaccagaaaaaccaaagcctaattagagggttggaactttcagccccacttccccaagcttcagggagggcagaggcgctgaaggttgagctaatcaccagtgcccaatgatttaatcaattatgttaatgtaatgaagcctccataaaaacccaaaacaaggttcagatgagttttcagatagcttaatgggtagaggttccaggagagtggcacgctttgttatagaacccaactggggcccactttctccgtacagtaagaccagataccacaccgaggttttgcaggagtagaaaggaaggcatttattggcagagctctaagcaaggcaaatcagggcagctgatgcttctttctctcctgaactcctcaatggcttgcaggtaagggtttttaaaggcaggcacaaatttcaggaaagcagaagttacaggcaaactcataaatcaaaacatggaccatatacattggtttgacctcaaaaggcaggacctcttgaagtaggggacccacaggccagaggtggattcaaagcttttctcatttgtggctggttcaggacatgaagctttgtttaaaattggggatcagcagaaaataatattagctctagctcatgggcatgacttccttcaggccctcaggaagaaatttggaatagagaacagtggtcagagttcagtcctcagtttttcgagtaggcagatctgtttggtgggggtctgggtttctgaaaaacaagtcaggggtgcatgtgaagatatcttgagtttctatagagaaccaaacattgttttgactaacttccttggctgttgttttagactactattacctttttgcttattaagttgctcatttacttctcaaggctagctaggtgcctggaatttcccttgaaggagctcaggattttcctttatttccatgcttcggggttccccacagcctgctaaaagaggggtccctgctccatctcagcctggaaagggcatggaagctctgtgtcccttctcccattccccaccctatacatctctttcatctggctgctcatttgtatcctttgtagtatcctttgtaataaacagtaaatgtgagcagtatttaccagacttctctgagctgctcaagcaaattaatcaaacccaagaagggggaccaggaatcttgatttatagccagtcagtcagaagcacaggtcacaacctggggcttgtgactggcatctgaagtgggaagcagtattgtgggactgagctttaatccgtgtgatctgctgctgtctccaggtagataatgtcagcactgagtagaattacagagcactcagttgatgtccgctggagaactcattgcttggtgtatggggagaaatcctcacacatctggtgtcagaagtattgtatttactggtgtgtgagagtaagaaaaacactttgttttttttctatgtctattaaggtttcatagaaaactgactccctcccatcccctccccaccccccaaaaaaatccacctactttctctgggaagaaggagaagagttaagtttttgtttgatttacatagcttgaacagagtcattattctttttctgttttgtgaatgtggatctaagttatatttatctcattccattctacatttttggtgtctcccaaaggaaaagatatgtttgaaaatgaaaggtcagtatgtattgtgaacatggaaaaggttacttccatttttgttgctgttctttcacaacttttggaatttgtgccctgtcagtagtgaaataggattcctttgcatttttttaatttgtcaatttacttttctcactttatatcagtaaattatccttttaaaatttactttagatgacttttctgcttaaaaaaaaagtaacctgacttttttctgtaaatagaaattttaataaagacaatttctcagttattctttattaattaattccaagaggctttgatgttctagttaagaaagtgatcagggcgattttcctgatttgctggctgtcaggttgaagtgaaggacaacatcttttgttaaagcctgtgtagccctgaaacttctgcaaatgtcgcttctcagagggctgtgagagtaggttagtttttccacctgtgctcaagaccacccccttcctttcttcagggcaggcttctgaagtctgagcttgtgcttttttatcttgggtgcttataaatatttaaattccatcataaacacatcccactggcttggacacatttgagaaatggctccagtggaagaacgtggaagaaatttggttgtttgaagttccctttcccactgtgggaatcttcagacttcttggctgtgctaaaaactactgatcagcctgtgatggcaagatggatactccattgcttgactctcagttgacccttgtcaattatgttgagaagatgagacaatctctgcagtgaattttaagttcatgtgtttattgagcatattaagtgtcaacattcactctcagacgttgtcacttaagtaggtaactgcgtgaaatggcttgggatttggcagtctatattagttctctattattgccatcacaaagttccagaaatgtcatggctttaaacaaaacaaatgtattatctaacagttttgtaggtcagaagtctcacataggtctcaccaggctaaaatcaaggtgctggcagatgtattcctttctggaggttttgggggaaaagccatttccttgatcatgtgtgttactggcagaattcaaatccttgtggttgtatgactgaggtctctgttttctttgctggttgtcaatagaacgctgtctctggcttccaaagcctgctgcattccttggcccatggccccttccttcatcttcaaggatcagcaagggtgagttgagcccttctcttactacatctcacttcctgcagccaggaaaggataatccaggataatttctccatatcaaggtttgtgaccttaattacatccatacttattcatttacatcacaggtttcagggattaggacatagcatctttggggagccattattctctctgccatagtcatggtgttgtttaatggacagagatgcaaagaggcattccattttacttagattccatttctgagactctaccctctctttaaaaagccttccttgtaattttttaaaacattttaatcaaagtaattcatacatatggtttgaagaaacaagtagtatggatagatttataatgaaaaacagcataaccttgtgccacctctcgtcttcagattctcgtctctggaaaactctgaaagttatttattcagctaattatatctaggtttctaaataatacagttaataccatttcctaatattttttgaattttagacatttattctgttccatggacaatgaggatttagctctcttgttccattttctacacaactcacaacctgcttctctctctcccttcccaatataatcttatatcactattttggttaaataagtagctaatatttacattaccatgagtatgtaaatgtttctcatggttgagacacatagtgttttatgagttttcgtggttgtttttgttgttgagacagaatcctgctgtgttgcccaggctggagtgcagtggtgtgatcttggctcactgcaacctccgcctcctgggttcaagcaattctcctctcttagcctcccaagtagctgggactacaggcatgtgccattgtgcctggataatttttgtgtgtgtttatttttttatttttattttttttcagtagagatggagttttaccatgttggtcaggctggtctcaaactcctgaccttaagtggtccacctgccttggcctcccaaagtgctgggattacaggtgtgagccaccacacctggctcttatgagtattttcctgaatttaacaattttgacttcattcatacactgcttaattttctgtgtttgttctagtaattcagacctaaattctctgctggagttgtaaaactgtgtgatacaatatttaaaaatcaagaaatttacaaattataatctacctaaagatattcctcttggagccctctatcctgtcttctgatgtggattaattctctatagacgttgctgtttgactgtcttcctgaattgtcctctcaccatcaacttgggaccattttctagaaccctgttttcctattggaaaaagatacataggatataattttgtggagattttgcatgcatctttatcccatctttatctttgattggtaatcggccagatgccagtcctattctaccttcagagttgctgttgcatgcctcatcccattctaattcttcatcttttgattgtggatttttttcccgtctagaaactttaaaaataatcttttaatatctggtgactatttctcagtaatatgttttagtgtagatcttttgtccaaccttgtgctagttggttattctttgactcatttacacataagttttaggccgcacgcatggcgcatgcctgtaatctcagcactttgtgcaaccaaggtgggaagatcccttgaggtcagaagtttgagaccagcctggccaacatagcaagaccccatctctattgaaaaaaattcaagcaatttggaagttttcttatattaattctttgagaatttcataccacagctcaatctgttgttactttctagatagatcatcctagttttctatctcttttagttctgtaattctattttatagctcatctatccaattgtctgcattcacactctcgttctctgaatgaaagagcatcctgtttttatttttttatgattgtaatattttacctgagtaaatgtggtacagttggttatacttttcttctggttcctggtttcctgttccattgtttccctttttttgcttcactttgtcatgtttgaggcagtaagatgtacaggttagaagcatgagctctggataaaaaccaaaagactgtgaaactggccatactacttagtagcttgtgaccttgagcaagttacttgacctttatgtactttactttccttactgaaaaaatgagaatagtaatggtacttctaaaactggtataaagtggtaattaagtttatgtgtatatatgaaaaacattaatctatatatataaagaagttaatttgcataaaaattaaaatatgcttagaatggtgcttgacacacagaaagacagcattaactattgatatttcagagcgtggcattgataagctgactgggagctttgtatgtgtgagtaggatttgacgactgacagcttcttgagtggaagcagataagatggtaagcgggctttttcattgaaggaccccaaatatcagcatctacacatccattctcttggtctgttcagttctctagagggaaactctacacatctctgcctgtggggtttaaacctgattgtctttgttctaggagctcagtcagggaaggaggatagggaatgtcaaatttggcatgtgaattttcagttaattgtctggttttctgcatggaatatcacttttgttcccagctgtggatggtgttacaaaatctacagcttctatgttcaaaacctctagaagctgggggaggggcaatcacctatttacaaactttaagccgatgctcatgttttcagtgttaccctgcacacccaccttcctcaggttactccagtcccaggattcacatgtttgaactggcttctttctcactgccctcacccccaacccacaatttcatttttttcccatcttctaagttgattactgcttatccactgcattttcagcctgtaaaatgttgttaccatctatcatcatctgttgtttctactcctcttctctttgcccttctaggtttgttcttgaaaaaaaaattctctactgtcattttggtggagaattatgagggaagagtaataaacactgtgttcaacctaccacatctaattgtcactctccaagcaagggctagcttcattggcagaaggggacagggaggaagcagacatttaagcagaaattcttgttttgagttttgtctccttttctctgacactggtggactctgttgatgtagtagttgtgatttcttgaggagactttcaattttactccagctccctcccagagagtggcagattaattattttttagctgcatcagtagttgatggtctagtcccttctacctttttctaatggccatttggtggccccacagctcccatatcccctccaacctctgtgttcctttatgaggagctgaggaaccactgagttctttccaccctcaaaatttcgtagagaactggaatggttatacccgcaatttttcttcccacaaacaccataccgttatagccccttcatgtcctattggcatgagctgatccaacagatctcagttcctcagtaatctctagatgagaagcaagcactagcctctatttttaatttgtgccacctacacccatacatacttcagaagacttatggcaagcttcttaggaactccttcaccaggcttctgtgaaggcttccaggttctatgagtgagcaagcttgaagcagagaggcggtggctatacttggaaatggtggagataatttatttttgtccatttcttttgtgtgtatttggaattacagggccccccaatatttttagccaccagtttatttaccatggaagcagtttgttaatttggaactcttcatccttcaacagtttttattgaatattcaagatgctaagacttaatttggaaactcttatacaaatctataatctcaatagtattcttaatgcaatggtcagtaattattagtcctttgataagcagagacctcgggactgccatggcacaatcagtcttggcccaacagcttcaactttcttccatgtgacaatgttgcagttgaagccattggagacccagtctttctctgttacacagattcctggatcagcacattcagaaaagggtgtctctgttaccagaaatttaaagtgagatgtttcatgataggaattttgcttctgaattcacgtttgccccaagaaattacaatccaagtcttgtacccagtcactggaatagttgccatggcacttctatttgtcttgaaattatatttgtcgctaagataccatgtaatagtaaaaatttaaaaacaactcccaaagcctctaagcagttgtatctgaattacagatttgtcatcagaccactaaaatatatatataatatttaaaagaagataagttacaaaatttctagcacatgttggtcactgttatattaaagacaatatgaaaaataaaaaatttcaaaggaaatacactcaagtcttaacactaatagtgtttggaatgagattgtggtgtaaaagttagggctaactttccccttttgaaaaatgtttctctgcatgttacacatttcttgtactgaaattatattctttttgagttagaaaaaataatttacacaagcacatgatataaattactaaattaaattaaaagtagcatatttgtaggtaaaattaagtatttaaattctctgttcatattttaaaaaaaaattttggagagagtacagattctaaatctttaccccatcacactactgaattctgaaaagaaatggatgtgtgtaaaggctaacttaaaggactgtggagtggagcaaatatggtaggttttacattgactattgctggttcagtttatcaaggaaggaaggaaaaggagagacttatttttctgaggcagacccaacttaaagtttctttaaaagcttcttgtaggttaagacatgttcagaaagctgcaaaccactacgtgttccaattcacattgcccttcatttttgcctgtgtgtttactaatttttagcctgtcaagtaatagaaaaggtagccttgggtggagcagacatcttgttgttctagagaagacttaggtgtccagtggatagcaagcaatgagcccccaaattctggggaaaataaaaatatcacaaaggcaatcttttttaccttttttatgtctgaattttttaagaaaatcatagatttccaagcaaagcagaaagaccatagtttgtttagaatgtcactttcaagaggattatcgtgggtaattttccaatgagaatatttagcaactttagtggaacataatcctctcagatttcagacagaggctttctactcctgctgatcttccataaggacaaaattctttcctgacttgtacttccttcacactatatgaagggcatcatatagccaacacagaaaatcttctagtggaatcctggtgcaaatgagatgaaaccatggctaaaggcccatttcttataaacagaccacgtctgtttgctccaactcaaattcttgtagcagccaaactggctggacagtttcacttaattgagtggcagggggtggggtggatggattgaagggtggggggattggggagaaggatattgagtgagtcataaggattagctgtgcatattattttactcagggtactctcttccctaattcctatgacttacccctatggattttccacatgtaagcaacaagtagccactgtaaattaccacttaataggatcagttccctatgtcagaaacctaaagtacttccacagaatgggaaattaatatttggcttttgctttctgagaatccatgcatatggtcaccatactacaaagaatttcaaattcatatttacataaatggatttgttctctttgcatttgtaatagtaacataaaggagtcttcatagttgagccccttattgttgagtccaaaaaggatgccgaaaacatgtggagcttgggatatgggccaagatggtaaacataatggttacaatttggttgtctgggactgttgccttaaagttgttgtattcacaatatcattatatatatgattaagaatatttttgtgacatgagtagacttctgctcaaaaaacaatttataaaacgttttagaaccttaagtagaccttctagctacctttagatgtactctataaatcaaatattatctttcgtaagcacttacttcttccctatgcctaattatgttaattattgcccaatacattaattatattaataggtatattatgcttaatatgttaattatttaaaaactactttctcataattcttgctgtaagtcatattaatggaatagcaagatatagagagatcaattcatccctataattttttttttttgagacaaggtgaaactctgtcgctcaggctgtagtgcagtggctggatctcagcttactgcaacctctgacctcctcggctcagatgatcttcccacctcagcctcccgagtagctgggactacaggcacgtgccaagatgcctgactgcctgactaatttttgtatttttttgtagaaacggggtttcaccatgttgcccagtttgatcttgaattcctgggctcaagccatccacactcctcagcctcccaaagtgctgagatataggcaggagccaccacacctggccatccatataaacatttgagctgaaatcttaggaggacctaaaggttgtaactagaagtcactgacagacaccctcaaggtctggttcttctccagaggaaaaggcaagagcccatctggaccaaatatacttgggccttttgcacttggctgtctgatatttcctctggaatagaaaaggaagactcaggaaaaactgatattgggtcttcctactgttggagaactaaggatctcaaagaatgaagacggattctatagaaacaggaaacaagtggagctgcatgaaatcctggagtgacctggccctctacttgaagatgcaagaaatggtttttgggctcaaggtcaatcaatattttctcttacgaacctacagtgtatatgagactgtgtagactcctgaaaactacttgattaatttatgtgagaaactttttttttttttgcctttagtactgatataagacagaactttttctcctcacagctggatcatacccagaagccatatttcttactgatcatgagctatcatagctattggggtttagaaagaattgaaatcagcatgatcaataattcttcccagaagtcaggcccagctttctggtgagagtggaatcagatataaacttttgatatatgttagatatacgctagatatatcaaaagtttaatggagccaaaccaagacagcctgctatatccactcagtgatggcagccagaaattattaaagtcttggcttaagaatcctatctttatcttcatactagaaacttttttgacatcagatttatagtattcaagtcaaatggaaagtcaaatggatgtctttctttcttagagtctgcttggatgaactcacctaaaacttgtcttagaattcttttttatctaaagtttcaacaaccgccttcttcttttctagggagaggaatggcatggagtttggggaaggaggaatataaagagaagaaaatgtgggcagatttcaagagacacaaaaatttgttaagtgctcaccatgtagcaaaaatatttataaccctttctcattggattcttattgaaatgatctatttcatagataaacagaggttcatggaggtcttgccataggaggtgataaagccagaatttgaactagatgtctctaataccaaaaattgtgctgtttcgctgtatcacctctgcctcacctatcctagtcactcgttaataatgtctcagtaaaccctattctgtgtctgttatgtctcaaggctatgctagatgctgagcagagaaagggcttgatacattgccataagtggtatagtagtggtacttagggggaatcatgaacaactgagtggtgcagacaaggtaacaattctgttttgcagggaatgcagatactcggttctataaaaactacagtgaaggtgggacatttaagtcttcccctgagaataagggtattactttgccaggttaagaggacaatggattggggcatagaatagggaaatgaagaagctacttcaggtttaggaagtaagaacaacagaagcaaaatttgaaagcttgacagtcctgattttttggacttccgtggtacagccagtgaagatgcaaagggtctcgtactgtgtattaagagaatgggagccttcctggaggtgaaactggatgagaaaattagagctgtaaaatttaatgatggagtagaatatactactgcagcacacactttggctaactcaggaacagttcatagagcctggcttcctgggacaccgggatagttgtactggagagaggattccagaagcaaaatagatacagaaagggctcgggcaccaattctaaatttcatttaaaaactcagcaagaacctgctaggcctgttttctttcacctagaagccagctgaaatgggttcatggtcccattctaccaatgagacacacagttgtgatgagagtgacacattcttgagaattggttgagtaaggggaagaagaatagctttgagatattcatgctttgtgctaagtgtcaggaaaatgacctgtttaagggaagtttagtttgactgagctagtaggggtcatctttgaaatcatattacttcatctctactatacgggctttggagagaggaaaggagttgtgaatgtctcctggagggtcatcaggagctacttcttaaactaagaatgtgccttatctccgccctagtagccattgtttcctgcagtacaatagaccaactcttctcttcacagtcatttcccccagtacattattttgtgagtgattatgagcctgggctttaactcgtgatagaagtttttcaagtactggctctaccacttatgagctgtgtgaacttggacaagttaattgacctagcaaagcctccctttccttatttgtggatgagaatgatggatggtacttaactcacagggcctgtgtgcagatgagatgagacctagaattaatagcacactttcaggtgctattccaaatgctttacatgcattcatgcattgaatttttgaaacggtaaccatataaggtagtgccatcattatccccatttaacagatgaagaagctgagggccagagaggttaagtaagtttcctaaagtcacatgactagtttcagagctgggatttgaacccaggcttttaggcttcagagataacactatttggctactgtgctatactgcctctgaaggagcatgaatcacctggacatatttgctaaaagatataatcatgaaataaatatcagccagtcaagaaagcctgactttttatttcaacctgatgttcagcgtattcctcagtattagaattttggaagctcaccttacctcactggtgcattagctggtatttatttcttccctaatccagttacatgaacacaattaaaatatttgctatttccatgacctgggaaagttctacgggaagacacttctttcaatcactaatttaaaacaatttcatttcaacctcacaaaacactgtcccgccctcagaaaaacgtcctgctgtgttctcaccattcttttggaaaacattcccacagatcaaacaaattaaagatgtcaggatccattgcacagccaatgtgtatctagatatttcttgtagtgcattttcactgaagttcaagtttattctggttttatcagctattgtccttaaaagggatctctagatgttgtaaaacttgagatcttgattttgactggcttctattttcgttttccgttttgaaagtttctgtcaaaggccccaagtgtgaatgaggaagattgcctttagtcctaaacctaccaacttgtttccgttgtgcgaaaagctgacatggagaaagttcagcaaggatgtcaggtctgccctaacataactgtgatggtttgcaaagcatgtgagcaggctcctggcaaaaccctgaggagaggaacttctccagctatagctctgggctgccatccctttcttgaacttggcacttaatgagctggcccttagcttctttgcatctcagaatcagcttggaataagctttattcttgatgtcgagccttttcagttttgtctctagtatttcctttgcagcagaaatttttattaacattcataaataacattttccacatactatcatttatctctcttccacctaacttatcccagattttgtggggattgtctgaaagtgattcacgttgttagtgaacaatttctacattgttcttgctggttgctaaatagagccttgcccctggttaagtcaatgagaaagatacaaatttgtcctcttttcaacagtttgtttcctgttaaacaaactgaagaagatataaaacaattcttgccatcagtagtcagatccctcttttaaaaagacatcatggctaggaaatggctctgaactttctgagatgaaatgactacctttcttctagaagtactgaaagaatttacaccaagtggctagagatgttttggggggattggatagaccagtatcacttggtgacctgctcagctgtagtcactttggcttgaagagcagacacatttgtgcagctatcccctttgttttatgatgtaaatcttgtttttaggatgagtgcttatggggcattgttgaggggtattacaattgccatctgcacccaaatagcccagatactgaattgccttaagatgccttagactttcaccattttaatcatttatttcattaatgttatctacctaaacccttatttttatttatttatttatttatttatttatttatttatttatttatttattttgagacagggtctctgctgctcatgctggagtgcagtggtgcgatcatggctcactgcagctttgactccctgggctcaagcgatcctcccacctcagactcctgcatagctgggaccacaggcacgtgccaccatgcctggctaatttttgtattttttgtagagatgaggttttgccatgttgcccaggctggtctcgagctcatgggctcaagtgatctgcctgcctcggcctcccaaagtgttgggattacagacatgagtctgcgcccagcccaaacccttattaaaatacaaacatgtttcttggagaatttaatattcaatccctagaaatatattgtaattttaatgtgagttctttttcaggatgtgataacgtaatggcaatgatcataactacaatagcaaatattactgagagctacaaaggctttttttcagacaggtacaattattagtattccattaagacagaattttttagtgttggcactactgacattttgggttaagaataatcgttatgggggctgtcttgtgcactataggatgtttatcagtttccctgtcctctactcactagatgccggtaggaaccccttcactctagtttgtgacaatcagaatgtctccagacttatcagatgtccctggaggagggaacttcatggagttaagaaccattatgttaaggagatgatgaaactgaggtctggagaggttgagtagcttttctaaggtcctaaatggcagagttagttctacaaggcttttctgattagaaaatgcttgtctacttactactgtataccaccaacccatcctacagttcttttcccgtttctgtctaatagcatatgtctagtggacatctgccatgtatactgtgtgtgcacacctgtatgcacccatgtccagcaactatctgttaatatttcaaagcactcttaaactgattttacattaatcctcagtcacccatcagtcacgaattgtagaaaaggaaactgatacctgtgccgttatcctagccatttctgagccaggagatgccttttaatggaggtctgaggtcagaggcttggcataaaagtccagattaggagaccctactgcaagcaaactttcatttcctaatggagctgtgcagcctgcaactccagtcatcactacccaggccccatcttatgtttggggtgagtagactatgccagtctccaagggataaataaataatatgaagaagctccaaaatgcttctcacccctgtgctgtcatgaaatggaaatgacacccaaagccaaaactagccaaatttatatctttgttttcctgcccatcctgtagtcattatcagaacctccaaactccaagtttcagcctcttccatccgaagcagttgagccactaggaatgtttgagaatgttagtagattttaactctgtgtctctttctctcctgactgttgacatcaactctttcatgctcagcgacattttcttcattacttcataaatacatgaatatttattactatgaggggaaagcacactacagtttacaatgactgcagctggaaaaaataataattaacacgagagatttccaggactcaggagagtaagcagcctagggaaggcaaactagggtctgtggaatatgaaaacagctgtcacccagaaacaaccaaaatggtaaagacctgccaaaggacattgtgttggcagaaaataaccaagagaagttttagattatagtgtgtaattagtgtgtaattaacatttgcataaatatttgcactgcggtactttgtgcatagtatggtagtagcggatagcaattgcacacacacacactcacacgtaacacacacacacagcaaaaaggctcaaaaaagtgtgtattcatatacttattcaaaatcttacttgaaactcaactccctgtttaaatcttccccatcttgcctacaaaaagtacttggcattttattccgatctctatgactcttttctgtttataagtctattatttctttagactctagactcttgacttacctggtttattgctttcacagtgcccagtgaaatgaaggtatgtagtagatgctcaataattgatggctgggccaggtgcagtggctcatgcctgtaatcccagcactttgggaggctgaagtgggtggatcacttgaggtcaggagttcgagaccagcctggccaacgtggtgaaaccccatctctactaaaaaaataacaaaaattagccaattgttgtggcaggagcctgtaattccagctactcaggaggctgaggcaggagactcacttgaacccgggaggcggaggttgcagtgagccaaggtcatgccactgcactccagcctgggtgacagaatgagactccatctcaaaaaagttgatggctgaatgaataaagatggtcaagatgagaattgtgtgattcagtttcatttaactacctggtaacatgccccaagcaggcagtgtgttagctactggagaacagggacatctcaaagatttgtggcctttccttcaccgtggtctgagatgatggctcatactacaccttattgctcaatcattcagctagtcagacagccaacaagccttttccccctcagtgctcgcaatgtgccagccacgtgcaggacctttgagaatacccagcagagaagttaacagacattccaatttgatgtgatacatgctgtgcttgatatgtgctcaagatttttcgaaaacagagaggaagacattctgacaggtagagtcagtcaaggctttccaggttaatgagctgaatcttgaaggatgagtgggatgctcagatgggcactgcaggcaaagtatagcacaagcaagtcctggagatggaggagagatggtaagatggcagcctgcaagtggctggcatggccaggtgacagcaatgtgaaggcctttggagaggtaaaggtggtatctatgtaatctgcataatgcaggtgaatgtctcaggtggcctcaatccaggctcttagaggggttagggagggtgaggccagaagaggtaggcagggccagacttagtggcccaaagtgtaactcaaaaagacggaggctgctagggacagggggcttgccctgacttgcaggactcttcaagggtggaatgcagaatcctcaccctgtgtaactggagtgcaggctcagggcagagagcaagttcaggatgctgtctcccttagggttagacatcctcttgtggtcagcatccaagaggaagaagcgaccacaccctgtcatttgctgtggagactacactgatgcctcaacttacacatatcaggctatcaacacagtctattgaaatagcttacttttttcttttggtcatttgctttgatttcaaagtcagccttgtctaattggttgctaagattgggcttcgtatccagttagggttgaagcattacattttactatccacataattcgtgagttaaaaatacttccaacagtttatgactcatacttttcaactcatagatgagaagtgaggtgggtgactgtggatgcctgcgattttggtataggctcaagggccagtgggttctaaatgtgatttctggtctgctgaaaaggccctgacattcccagatcattccaagactttcgggctataccagaaattagagccacatccatttagattcaagtttattacctactgtgatgagtaacattttaagtttctatcaatcacacagtcttttatgtgtttgaaagatctgggagtaggttttgataggtgggagtcagggttgggaacaagaggttacagggtgggggaggcacagaattcacctggttttcgatttcatatgagattaatgcagtttggttcaatgtgccaaatatttatggagcacatactgcattcaagatatggcaacatgtcctcaggctatcaaagatggggctcctgtgatgcttgccctcagtgaggtttctagcctttggggacactgagaaatatatcaataactgggatgcagctcacagtatgttgaaacaagctgctaaggggcacagaggtggagagcgagtaggtttgtgtgtgcagatgggacaaggtggggacgtgagaagaaagggagctcaggccacatggcagtggacactgagtgagaatgctgccaggttatacagacccaccctagagttggcttgctcatttgtaaactaagggtgatgagtctccccgtgtcctgcagaggtatgttgtaaaggttgaatgaattgcataatgctaatgaatttgaaatatataaagggtgtttaaatgctgttaaggcccctcacagtggcttacgcctgtaatcccagcactttgggaggctgaggtgggcggatcgcttgaggccaggagttcaagaccagcctggtcaatacggtgaaacctcatctctactaaaaatacaaaaatgagccgagcctggtggtgcacatctgtaatcccagctactcaggaggctgaggcacgaggattgcttgaacccgggaggtggaggctgcagtgagccactacactccagcctgggtgacagagcgagactccatctcaaaaaaataaaataaagtataaaataagttaaaaaataaataaatgccattaattatttcattgttggcagcatcagaatcagaacccaggctatttggtttaacccttaatctctgtgagccttcctgaaacttttttccccttttagtagaatttgctttattggagaaatcttttggttgctgtaggcagctgcatgtgtctcttgatttacagaggagggtggaacaaggacaaggaggaagatgacattgataagtgtgggtggagaattctaaatttcatgagtcaaatacaatttctgggactcttaagatgcttggaacctctttgaaaaactgccttacaccctgtgttttaaattgtgcagtggagcatacattaactgagtgggcctgcctttacatctccagtcccatcttaggactggagatccctcaagcattcaggagaacttagcttcttcctaagacatgggtctgtccaggccttgcttgcatgaaatcttacattgtaagatttaagtgatcatgaaatgagaaatctaagcattgaatttattcatggactctgtagtgggaaacctccccaatatactcttgtttgagtgacttggaaaccagaaagaaatagggcaacaacgctgtttattttgaacaatatttcatttgctctgctttcaaatcaattatttgtatttttgttgtgactgaaaattgacaaatgtcagaggaaatgctgcatgacttttccctgtcctggaaaatgaagaaacatatttattgaccatgtcggtggttttatatctaagtatcagctgctgttcaaacctgttcttttcctaatttccaacagcatgagttcaggtggcaagggatactttctgagcaggtagtgtattttgttagaggccagtaggcggtgtgtggtgcaaaaagcagccactgattcttgtttgacttcttaaatgtatctatattgtgggagtaagaggagactagatgcgacccacagtcactcactgaggagagaagagccaccgcagaaccaaaaccaaacctcccctctcttgtaagtagcttcctgtagccaatccattctgaaaattacaagcaagggttggagttgagaggggatcttctttcctctgctctttgttttgcttggtagtggtcctgctgaaaccctggctccttttatcattctttccttttatagtttcttcaggaaagccccaggcctctgaggctggcttcctccccctccagagattttaaatgtgaagacaggaaacgtttgttgggcttcgtcattttatgacactgatgcccactccccctcccacacactctcatttgatgcctcctaaaaagttctgccaacattaagcaaccatcttttaatgtggctttggctgaacttgtcctctaggaagtgtgtgtggcagggcactcctatctcagccacggcagccacttcagagagctgagctcatccgccattccagtgttcagaggccctgtgggcgtcagcttcgctcctacagcactgggaggcctgaggaccaaagctacctcttcagggccatctggctgcttccaggaccagccctctcctttcagaggtagctgctaggtgtcccaacaaacgatgatatgctgggtatatgcatagtattttccaggcgatcccatgggaaatgacagagtttatgtgggaactagagaaatacatagtagttaaaggaattgttcatccacagccattcgggcactgatagaaggtgaatttccaattctcctttctaccaaattttgtttaattagctagtgtattttcactgttgaatctctagagcagttctaaaattgtaacatgctctgccatccccaattgctaaacttcactggaaagctctgtgaagtaggtacgtgggggcttcctcctactttcaactaaggaaactgagttggggaagaagttcttatgtggcctagagccagacagtgagtgaaggagagatatgctctaaaaacttagcctcagattaggagaccctggtttgctccaaggccatggttctgtccctttgctgtcacacatatgtcaaaggaaagctgtagaaatgcataagaaactcacagattactgcgcaatccacctgggttacatcatcacaggattcaactctcactttgtcattagccttttctgtaagccccgccaaagattaccttcctaaaataaccctcaaagccaccaaaaacctgaactctgcctgaggcagggtgtttgaaggcagccagaccttcctcagattatctaagtggtgatagagagatagttaccaatgatcaaacttcttccaaatctcacaatttgtactggatgggcaggccagctgctagaacaagtttaaaagaaatttaaaatctagtttctaacctctcactgtgtcaaaggatttctcctaatgtgaaagaaacttggcactgttccaggtgagggaaataatagagtgaaaaatacacattttcatgtgactttttctgtaaaaaataccaaagtcaagaaaaccaagttaaatcattattcattacctctaacagccacaaattaccttctctgcttcttggactatgggcatccatctgccttttcctccttcgtgtgctcagcaatgatgttttgagcatatggtattggtatgttagatttatgtgcattttaaaagcattgagtccacttcactttaagcttctctgctttaggggtcgacctactgtaaagctactttcagtttcatagtgatccatcaatatgagtcggctccatgttttgggggttgagagaactatgtaacaaggtgttcttttaatgtcctgcaagtgtcagtgcaggatttccagctcaatgaaagatcactgaaatgcatttcctgggctagtttctcatcccatgggcccctcacctataaccacagctaaacatggaattcttttatagcccaaaactacgtaactctcaaatcagcccacaaagcgtgcaagaatatttgggttctgtttttatatgtgacagaactgttataccagtcctgcctcacctttgttattccaaggaaaagcatctaaatgctatctacatggactgttataacaggagaaatttgccttctgtgtctgtgtgtgtttcagcctagcttttttttttttttttttttgagacagagtctcactcttgttgcccaggctggagtgccagggcgcgatctcagctcactgcaaactccgcctctcgggttcaagtgattctcctgcctcagcctcccgagtagctgggatcacaggcgtgtgccaccatgcccggctaattttgtatttttagtaaagatggggtttctccatgttggtcaggctggtctcgacagcctgtcctctttataggtggtggtcggggtccttgccagggtccgattgaccatggttcttttgaacagatttttcctggagatctcagcacaggtgaagctctgaattgacccacagcatccccacagaatgtgattcttgagtcctttgtgaaggtcacctcctctaacctctctatatatacatactcaaacttctttggagactggaagattggaggtactatcttttagagtagttttgctgaaaagtgataaactcctttcacagtgtgggaaaagagatccagtaaagcttaatcacttgcccacattcacagtgaatagtgatttttaagagctagcaataaatcaaatacatttcctgatattgatactcaagtttctatacttataatcccagatggtcaaagatgggcatatatacaagaccttctcaaacagaaacatgggctatctctgccttcttcatgcagtgcttcaagtttgggggccaaggattagaaagtacagaccactgtgttaattgttgtgagtggataccaaataatagcaacatgtggtccccatgttctatgagcctccagtccattcgaagagaaggagctctaaagccactaaaggtctgacaaaagcaatgtgtgctcatgcctagcgtggtctaactataggagcagctgacctgaccggaggagacttgtacggtggatcctcctttctggaacactgacgagaatcaagaagagaaaagtaaaacttgtcctgacaacaaggtgtccaaaagctccctctagagccctagagattcttattgtgaatctcttagtttagatgatgcccataatatgggagtttcccatcactctggaaacttgcagccttggcttttaattcagaaaaattggctttgagaataggaactattacttgctggctgtgtgatcttgggaaagtcactgactttactgagttcacttctcttcatctgtaagtggggatatctacccacaaggattttgtgaggattatcagcagtaatctgtgggagtatgcagatgacaacaccagatgctgtcacaagggggctcttacaagcacgccattacctaaccaagtggacaataagacccatattagaagggaggtgggggtgagtagtcagggaggtaggggtattggaaagagcaaggagttccagctaacaggtgaccacaggggtagaggtcacatagcataacatggattatcagctgtcagggtcaatggccagacctgacccagcatgagggtatcattatgttacagcttggcacagggcaatctgtccaaggatgagttttccccagccagcttccacatacctgagagcctgatgttagggaaggttttgtcgtttttgtattgaattataataagaataacaacgatgacaacaactaacccaactaacactgtgttccagatactcttctaagggctttacgttacatcatattaacttatttacccacagaacaattcattgaagaaggtactgctatcctcgtttcacagacggtaaagctgaaactcagtgaggaaactttctcaaagccgtgtagctatgaagtagtggagtcatggtttttggccaagctgtctgttcacactttcaaccactatgtaaatgacatattaagacttctgactcctcatttgtcagatatgctgaaaaatcttaatatttgccttttaattttatatttttgtacattcagaaattttcaatttttatagtcgtttatcagttcttttttaaaaaaggattcttccttgcccacaccaagttcagctgttttttacttcattctatttcttttatgcttttatttaaaatttattttgagtttttatttttgagataattataggtttgcaggaagttgcaaaaatcatgtggagaagtcctgtgtacccaatggtaatgtcttacataattatagtgcaatatcaaaaccagaaattgacattggtataatgtatatgtattatgtcatgccatttcatcccaggtagatttagataatgaacaccacaatcaagaggtaaaactgttccattaccacaaagatctttatgctttgatttttattcacaattttttggttcatctggaatttattttggtgttattgagaagcagtgattctattttctaatttccaattttctcagcaccatttgttttacaaatcccatttttgacactgactagaaatttcacccttttatcccagcataacactattacaaatcctatatctttcagaccccagagccattgctccttctgatccactacatttcatcctaaaatttgggtcatgccagaagtaatatttaatttttatgccatcagaagctatagagcttgaagcaaggtctcggaccacttaactgtgctgctggtgccaaattattgcctttttccttgacatttatccctggattttactgggacaacagggaaaacagcaccatcttctgcaccctggcggctcctttccatggtggcatatctcagaaactcagaggggactggtgtggtacaaagggcatgagttcagagccataaaaccgggttccctcacttttcttaatttccttaatttttctttggccttagtgtccatcatctataaaatgagaaaaactctatctgcttcagaggcatgtgatttttatgaagactacatgagatcatacctttaaatatatggcctaggaagggctcagcattgtctagtatttatatgatcattaatatttctaataatacagcatttcctttattctatggtacatatattttaatttatatttaaagacatttatatcagtatgtgtcttcaatcatgatagtgattcttatccttctggaaaagtcattatggagtggctgggcgcagtggctcatgcctgtaatcccaatactttgggaggccgaggcaggtggatcacttgaggccaggagttcgagaccagcctggccaacatggcaaaaccctgtctctactaaaaatacaaaaattagccgggagtggtggtgcacacctgtagtcccatctactcgggtggctaggcaggagaatcgtttgaacccaggaggcagaggttgcagtgagccaagattgtggcactgcactccaacctgagcgacagagcgagactctgtctcaaaaaaaagaagagaaaagtcagcatgataagagtcttcgaatttgggaaatgtggtcattgtgaggttagagcatggacttgattataataagtggaaacatcttcctctctgggtgatgtttctcatggcagtggcttctttggtgggcagtaacatccattcagcaactttctagaggctgctctggtgtggggacagccagccttgttcccagcaccacttccagcgagcagctatctctagagaccttgctgagtctggatctagaagaaaccatagcattgacaaaaaattttgagatagctttgtgtgctggctttgcatttagaaggctaggttatataatctggctgcctccttttttcttttcttctgagcatagttcccagactctcactttgctcaggatgagcagtcctgctccttaaaagagtcttcacaaagattgtggtcatgacacagttcggctaagtagagaactacccaccctcattgtccaccctcactcttggaacaagagcatctctgtgttagcatgtcctagcagcttcctcggatacctggatatcctataattgcccaaggtagaactgtttggactgaactcgaatagtgactcagattacatgaatttacacctaacactaaaagaagaacctgcctttaaatgaggggtatagatttgaattttcagtgtaagctaagaaaatgctgcaaaatctactttttttttttttttttaaaaaggcagaactgtttgggcaaagagaacgttttcttcgtctcctttctttgcttcatcctcatttgtttcggaaggtgttttgaatgaatgtatatgcgtgtttttcttctaagttgtcatcatataacacaagaatgatgctgtgattatcatttcctaaagaggcactcctacaggaaattgggctgcaagagaggaaaagtgtgtgtttccctgaaggaagtgcttgtagaaagctaaatctgggaaacaaatcatggagaatgtataaatagacttctggctctttgcattttagtggtgagatagtacctttggtcctatggaacacaaatgttttttggatatgatccttaaggcatgtgaaagattcaggtttaattttaaaaccagcacctacaatcttccaataacccactttccctaaaccacttgaccacaggcacatataccacaaccatcaacatcaggaaacttacaaatgggaaaattgaatttcatttaaaaaaggaatctccatggatgtaagccttaaatattgtttctaagtagatctggtggatttttgtttcttaccaaagaattgacttcttttgttaaaacttggttgtaatataaatcataatggaaatatctttttctgtgcatttagaaaatacaataaaattttagcaatgaataggagctttgggagaagaaatgaattacagatttttagctgttagcagaaatgatatacaatctttctttgtggtattatttaataatatttatatactttgaataaaatgaaatagagataagtcattcctcacctttcagcttcaggaatagaatgtggtctcaaggatacttgccatgtctccacagcaccatttaaagtgacaggaagcagagagatatattagtactattgaagtatttcagtactaacgtcaacattgggtaccaggactgaaacacttcctgggtactctgtgctttaatggtgtcctatacttacctcagtctggatgtctgagacttgatgcccttcattccaggttgtgataaagcaaaaaggaaaggagaattgcattgagtatgtagagtgtgtacatcctgcagggcctgtcagagctcttagtggatgaaggaagtaaaggaataggtcaataaacttttctggaagccgttagtgtttgtttcattctcacctagcctactgctctctccttttatctgtggtccctgcttctcttgccctatctacattagctcaatcatgccaccacctgctcagagcccttggaggccttccgatcacatcatgttcttcttgtgaatatgggacctgcaagcacctatgtgatcaggggcctggctacatcctgaactcatctcctgccactgactcccttgctgagcaaacccctgcctcaggtctttatacttgctgttgcttccgcctgagcactctagatatcctcatagctttccttactgcagtcactgcttgctcaaatatcacctcttcaatgcactccccaacccccacccccagttatcatgctctattcccttccgcttctttcttctggtccatagtatttctcacctctctatatcagattacatgtattcatctgtttattgccagtctctgtcatcaagatggaagttccttgagggtagaggctttgcctgtagagtttaccatagaggtcccagtgcctagaacatagaggagcagtaaacatttgttcaatgaattattttgttagtaaacatgagtacttgcctctcttggaacttcctatcacaaaattgtacaataagtatctcttattcactgtcaggaattatgatgacataaattttagaagagtcactagggatcatgtgatccaccagttttcaacctttattttagcagtgcaagagcacacaatgttgtttgatgcccttttgataagactcctatgggtattcccacatgtgttaactcttccccaccaaacaataactagccccatccattatcacgctaagaaaagtttcgtaagtaattacacaacaattagtcatgtcttagcctatttccctagaaagtggattcatgtgcacaggatttaatgagggagcagtctttaggaaaatcctgtaagagagtgaggagagcaagatagaaaaggaggaggatctacaaggatatggtcttaggcaaagtctagccttggtctggtccccaggctcacagggctgtattgccctgcaaggagttcaggcttaagaaccttatgtcattgccaacccagggttgtgggtaggtggcttcccaggcatctctccttgttctgcctagcatggagaagtaactggagaaggacacaggtgtaaacgtttcctcagctgtattcctccaagcagccagagtacaagtgcattggctggtcaggaagatctgaatgggtggcaccaacagcctctactacagatggtttctccgtagtggttactcactataggtgataaccgcagttctcaaacttcagtttcagaatcacttggagggtgacttaaactacatacatattgtggggcttcactgccggaatttctgacagatctggggtgaagctcaaagattaatttcaataaattcccaggtgctgctgctgctagtcaggggttaggaaccaacttcaagaaccactggttatagcatactgaagattgccttgaagacattctcagacaaaagaaacacaaattttaccctaaacagcattggaagcaacatagatctttactgaaattttcttgaggaaaggacagggctgtacataaactagggacagcacccagctaacttcctaaaaaagaattcctagatattgctcctcttttcaaaattcccagtcttcactgtactgactgcatctatctctgggttatgaaacattctctgcatgttaactatacggcggaccacctctttctctctcattctagaaaatgctgtagaacgcaacacagaggagatacatttctacagacacaaccttgaagttgcttttacttactgagaagccatttgtaaatttttattctacaagtattaggaacaaattatttgtgatccatctcagtttgtggaaataatatagatacaaccccagcctctgttttatagatggtgagtaaggggcactgagggtggtaaggctgttaatgttttaccccagagaacttatctttggagtttttcatccacttcctcctccttcattctcactcctctagatcttcataaaaagggtagttttaaagatgtgtgtgtctgtgtgtgtgcaagcaggagagagagagatttctaaaatcatacctaaagaaaaacaaatgagaaaaactttataatcacattaataactagtctaggaaaaaaagagatgctacaactagataattttatttgagtggagagcccagcaaataattatccacttactgaaagatcaaccccagggctcatcagaggttttattattggttaatttattttttcccatgggatcttaatttaagaaaattaccttgaggagtttttatttgaaaagatgccatctaaaataaactcaaggtttgcctgtatgttctctgtgtttagagtgtgaaatgcagccgttaaggtgttacaggataagctgctgccagtggactggggtaaaggaaggaattgggagtacagtgtcgttgcctgagttggttgatatacacttaggtctggagcactgtttaacaaggttaatgaaacttctaaatcagagatgagcaatctcaaatgcctaccagggctgggcagggaacagcagtaagtgaaggccaacgggtgtgagaaactcaggagaagtgaccactgcgctgcccaagagaggacaacttttcttcagagagcaactccgacccagcccctggtgttaaaagaaaagctggaggctgggcgcggtggcccatgcctgtaatcccagcactttgggacgctgaggtgggtggatcacaaggtcaggaattcgagacctgcctggccaatatggtgaaaccctgtctgtactaaaaatacaaaaattaggtgggcatggtggcgcacacctgtagtcccagctgcttgggaggctgaagcaggagaatcacttgaggcagaggttgcagtgagccgagatcccaccactgtactccagcctgtgtgacagagcaagactctatctaaaaaaaaagaaagaaaaagaaaagctggaaatcaggattttgttgtgaaatttgataatggagacgttagtttgcaacttctgtattaaaaactgccatacccatttctctttcctatccagtcctccccatagacctccattcctccatcttttgaaacttcagcgctgctgcccgcagagttcgctgctccctatggaaccttatcactaactgttggagtcactcattgaatttatactgttttgtgaattctgtttatatttgaagtcattgataaaatgtttctgtgtatcttcaactagattttaggtttgtaaactctgagcacagtatccagtctcatgggtctttgagttccctggagtggctcatgccttgacatgtacagaacaggatgactggatgactggcctgcgcttaggtagcacttaacagcgtggcagaggtgttcacatcctcactctcattcagttcttcccatggctctggaagtgaggtccgcatcaaagatgaggaaactgcggctccgcaagcctagctgacttagaaggcggcccagccataacagctggcacttgaaactgactttgactttgttgccttctatagtatgtagactgcagcttctttgcttggtaaataggggttatgaatgatagatccatgtctgaatattcaaattatttgtatggattactaaacattcatcttgtaacttttaggaatggtgtttgttaaaggagcaacgctaacagagaagttgataggtgagatctgatagaaaaatataacctacctcctcttaaccacaagtaattctataagaacagattcagctgtattttctagccaaataaagcatattgtgttgttgcatcaggcagaactggaaagcagcatatatctcacattatatgtttcacatgaaagttgatttttcaccataatttgttatgggatgttgtgcaaacctcctggaacataatgcagtatggaaggaaaactactgattgcctctgtagagaaaaagagtttaggattatataaaatttgtcttgagtatgcagcttttacttgaaatgctggccaaataaaatggaaatatatttgtttcttttaaagtatttcttagaactaccagttaattgctatctttccagaaagggatgtcgaatccaacatttcaacattcagcctctgaatatacctcagaagaggatggagtctcttacctgaggccacagggggccctttggcacatgcaggcctcacatctccatagagttaaacttagggagcagacttcagagtgcgctgccattattttattcttttgaaacctttagattttactgcctctggaccttgggcccatcccagaactttttcagtgacttgatagtaaaacgtcttccacatccctttcagtcacaagacttgtctaaaatgtatttcttacattcacatggtggaatagcaaaatctctgaactactttagaatgaaagcctctatttttttccatcaatggcccacttcaattcagaggtctttaatgaagggaggaggagggggtgcggttggcttctgttccgtttcctcacttgtcctgcacccctggccccagttacctgtcaggaaagggacacagcagagtagatgcaaggacaggagaagcctcccctgactggcactgtgtagtctggtgtagaccttctctggggtggagactgctgcaggctgaccctctcccagaaagggcagttttgttcttcttccactcagaaagtcctcctgcagggctctgggctcagacagtgcctctcctgtgcctggcctccgagcatttccttagccccttctaagtcctgtaggtatgataaccctcccatcttttcttggttatcttctgcaggcctctttgattaagcttgagggcaggaagaagcagttcctttgtacatccatggtcagggtgttatcacaagaaatgccactgtattccaataattttatacctattaggtagatgttgaattaagggttaaaaaccagttttcaccactgccttgcaagtcctaccaaggcattctagaatcacagccacctgtaaatttgtgtttaacctttgggccttaaccacaacagaggtggatgtaattccatcttcatattctgtagcatgtgcaaatccttctctgcacttacacatctagctgtggtcaatttgagtgtttgtctgggaattatcagttgtgtagaaaattgtttggattattccttctgtttctctccagtccctaccctctcctgtccctctcccaatgctccccatcacatcatgcataaacttttctccatattctcttaacccttttggaaaagaggcattttaaccacattaggggacatcatttggtatctaacttccatttcccatgtagaaaaccatctgaagttattaaattaagaaacattttaaactttatgtcagtttccatgagaacattaattagctaatattaatcattgaaaacaaaacaaggccgggtgcagtggctcatgcctgtaatcccagcactttgggaggccaaggcaggaggatcacttgaggttaggagcctgagaccagcctgcccaacatgatgaaaccctgtctctactaaaaatacaaaaattagccaggtgtgttggtgagcgcctgtaatctcagctacttgggaggctgaggcaggagaattgcttgaactcaggaggcgggttgcatttagcagagattgtgcctctgcgttctagcctgggggacagagccagactctctcaaaaaaacaaacaaaaaaagaaaacaaatcaaaaaaatagaaacaaaaggaacataactactcatcccccacccaaattcaaaagattctctgagatttgtcatatacttatttaagtgtccctaaaaagagagctatggttctgctgtagtttctgtttaaatctcctagttttgcctgaagccatgaagttaacctcagagcagagcctctctccagcccttactccccaaatgaaaaccatgtgcttgtgtgggttttatttgtttttcttttttaagatcttctccattatttaaggaaattattacataactgcataggtcttcaataatagagttcacactggcttttatcaattaagtcacaaatagtttttctcagaagcaaatttaactctagacatttttaaagctgattgtaataccctggaaaagctagaaacttcttgcatgctagccaagtcaaactgtacaagagaatacatggaaataatatgtggatgaaacaataatacttgcacagttcctagccatacttttctccttccgtgaaggcaattaatcagtctaaactcccacactgggtagtgccacttctgaccctgtttaaatgtagaaatatgtaattcatactgaagttctatcatgttcctaaaactcagcggcaaatcacaggtcagtacacagagtgaatgtggcttctctgccttccacttgccaggagttaaggttgtgtatggaaaaaaaaaattgtaagggtgtgacttggattataaaaatcacacttttaattccactgaaacataaaaaaaaataaactctctcctttgttcttaaaatagaccaaatttgtacagatagggcattcttgaacgatctattcatttcagttacacaacagggaatgagcagttatggtcagtgcagcaaacacagcaaaggtattgatgcggggtgggatgggaagttttgctgctgtgacctcatctatacaattgcagaagaacatctagcctgcctccgctgtcttcttaaagtcccatctcctgttccctggcatccaatcccatctccctcccttcaggaacccagtgtcttccactacaggatggaaggaatgtcacccaaagcatgctccatccatcagttgccctcattttccataaaacaaacaaacaaaagagctcaatgtgtctaaaactgagcttacctttgccccccctcatgtgttttctatctcagtggatgggcacgagcatctaccaaacataaaagctacaaaaggaagaatcatcccagacttctccctgtctttacctgcatattcaatcagttgctgagtccggattccacctcctcttcctatcttctgattccttttctgttttcccagacttgtcttttgacatcctccctcacatctcctgccatatgcttgttaagctgttcccagtccctgtacccccaactctgtatcagccaagtgattcttcacataccactttcctgtggtttttcgccctcccctgtttcctcttggaccatagttttcttctttgttctcctgttgcaccctcctctccatcaggaaagtaaggattgcattttgtagcgcttgttattgacttatctttcttcctcactagctggcgttctgaagtcagagacattttcctatttctctcctgtctttagtgctaagcacagacaagccgcttattaagtggtaggtgagtgtattgctggatttgggcattataagaggaacttgtgaactcaattgatgagctgggtggggaacatgttcctgactttaacatattgcttgaccctggtgagctgccagtaaattcctgtggaattctgttgaatactgaagcagggaggttttcctgccctgcacaatcctccttcctccctgattccatcaggtcagaagagtggtcatcagcagtgaagaaatactaggtttcaatttgctggatcctattacatataatgtgactgagcagtaataagtcagggagcccaaatggctgattgatgtttaacctgtacaactgtcatctctgcagaaggtccaaacagttacttcaaaactttaactcattccaaagtctacttctgtttaacaaatttaattaatgaatcaatggttatctattaaatgcttgttgtgtttaaagggattagtaatatttaaatagaataagctttaaatatgtgagcacaaaagaactattcaataaatatcactagggtaattggctaatcatttgtgaaaagagtaatttttgagattacttttattaaatatttcaatttaatatataataatagaaaactaaggtaagcgtttatcacagaaaatcagagaaatcatggacatgaagccaatgaagaaagcagctcactatgtaaatactaaaacttctctgtatctactaaacacaaccacagtatataaacgcagataatatattttatagatttcagatatggattgaatgatgcaacattataagtatcaatgagaaagaaaaaatgccactagtctaactgtgatataccatgaattgtaatatataactagattttaaagatgttaaaatgcgaaagaaaaatgtgccttttgggatcaacaaagtatagtagaaaactagaaaaaaaaaccaatatgatagaaaaatgtcatctgctcacctctactgggaatgtaattttatacaatattttagcagttatataccagaaagtttaaaatatgcacccttttgacacaaaatttatttcttgaatgtatgctgaggaaataatcaagaatacatagaaagattaagctacatatttgttcactgcgataatattgttgcagaactttctccttagttcagctaaaagcaggctcttgtcacacgaccaggaaagattaggctcgcggacacatagaagggtgaggaaaatggaatttattgggcgaaggggaaaaaggaaaacgaaccaaagcaagagagagccctgctagcagcttttctgactcacagattgaatcccaggtcaccacaggagctgaagacagcaagctcctcccgtgcacaaggcgtgaactccccgtggccccacccatttcccccagggcacatgtcgggctccagtccactgtgggcatgcccagacaagccctgggcaggttccctcatttgcacaaaagcttctgatgtaaacacttgtggggaaggttggagattctctggggacccctttttatctgtgtaggcatttggctgtctcaatatttataaaactgaaatattgggaacaatttaaacgcacagaaatcagtgattagttgaataaattatagcatatctatgtcagggcactgcccttgatatttacaaataacgctgtagatgaatagtaattggcatgggaagatcttcactgcatcgtttggttccaggattttttctaagaaaatatccatagacatagttatagatatatagatataaatacatagaaaaaaatatttggaactaaatttatattagaggtagttactgaaaatggtacataatgagaagtatattctcctcttcttctttattcacatattttagtttttaaaaattatctataatagcacaataatgaaaagttattttctattttaaatgaaagatatgtctttaataaactgataagattgacacagtaaagggagaatacaaatgaaagtgcttttggaataaaaatagaaactgtgctcttgattttggtcatttgtatcaaatcatatttcatgcaaagcaataagcattctgatataaaaactagcatctcccattttattgctgtgttgattaataacaaatcagttttctatttgtgtctcatatgtgtattaagactctaacctctgcaaccaaatccaacaaaatcttgtgaaaaatttcagaaacaatgtttgagaagaaacccgggacttaaaaatgaacaagtatgcagtgtaagctgaccctgagtgtcacattttaacatctgtttttcatgttgtgatacttatttgagatttggtattattaagtaacgaggaaaatatcttactgtttccataggtaacagggcagtaacttgaggctgatggattggcatgctttgtctatataatgtaattcaaataaagtcataacattttggctatggcttatttgtcaaacatttatacattttttttgtctgataaatgaactgctaggctttctgactgtttaataatagtccaataaaaagggagcaaaatagcttttgaccttccatttaatattactaccagcagtttggagatttaggtgtatatgtaaacatttaaaaatgattttgcattgactttttttcagaaaaagcacttttaatattttaaataatacttattgaaatggattccacatacttgtgtctgagccagtgtccacactattgccacaaactctgggaacaaattcttatatatcagatactatacaaatatttatttataatcttttcccacagactatatgatataaaaatttaaaagccagtatgaaagtagaccacttaaaaaaggtaactgaatatggttccctaaggaattaaggccaatttggaaatttcttatgtaacattcctaaaatacaaatttcatcatgttattctatgtctaaactttttcatatctcttcattgtccttaagataaagcccgatgccccgacatagcttatggagccatatgtgatctggcacctgccattctccctgggctcatcttttctatgaaacccctttgatccttcagggcattgactgtgtcctgctttctggtatataggcctttgcacatgctgttctttctgaaactgtctggccattcttttcctttccctgttcctcagtcctctgtatcctaatctttttcacattctgttccaggctctaatcatctctaatgtattgtgattattctttaaatctcctgctttcctagctgctggtgtatgcatcacatcagctttccacccctgaccatggtctccctcagggactttcagttgagcttgttgttcccacattggattctttggcattatacctagctggagccagccccggagagccacatgccaggggaccttaaaacctgtgggacttctgcaagccaccaacttaggaagagcaaaactgaaaaccaggaaaaagattttcagaactgaaaaccaggcaaaagcccacaacagaaaaatggaaagcagaatgaggttgagaagtggttccacacagagggagaactggggtgaagatgagaatctgttgggcgagatgaggtgagaagcaatgaagctgctgaaataaaggtgcataagggaaaagacaggagtgcggagagcttaggtgagacgtcacttagtaggcagagcacacacaattctgttttgttttgtttttgagacagagtctcactgtcaccaggctggcatgcagtggcacgatctcggttcactgcaacctccacttcctgggttcaagcaattctcctgcctcagcctcctgagtagctgggattacaggtgtctgccactacgcccggctaatttttgtatttttagtagagatcatgttggccaggctggtctcgatctcctaacctcaagtgatccacctgcctcggcctcccaaagtgctgggattacaggcgtgaggcagcacaccaggctgggagcacatgcaattctggtacaagtcataaacctagattctagtccccccactgccagaccttgggtaagtcacttaacctcatgtgattttagagtcacatgaccttggttaagtcacaaactccttggtcctgagtattcttatctattaaccaaggaatttgtgttagatctgtatttgtcaaaaggcacgtaaatgttaagaggtacaaggggacatggaggggttcacaaagatatggcataaaaatgccgcatcttggattacttttacataatggaacaattttaaacattttaatccagagaagaatggagatgctgtatatcaaatgcaaaatttgaacagttttagaatgaagcatgagaatacaaagacattttattcatggtgaggcctctgtagactcttccccaaaatgtatatggaatctctgttcactcctctctactatttggggcccttcagtggacatgtatgagaaagaatgactacagtattagtcagactctttccagctgaaacaagaagtttttaagaataagattagtgtaatgtgttaaatatgaagtttactaataacagtgttctgtctcttagaaataagtaaaataatagcctttagatggccagatgccactctgtgtcatgtttttgctccttgaatgtatatattttgtaataaaatgcatcccttacgtatcatctttgaatgagactaaaagatgcacggtgttttgacaacatgaagaaagctttacagcatgttacatggaagattttaaaacactgagctgtattttttctttatatttctaggttctacctggatttgtaagagtcaggttatttttcctggttttatgaaacttatcttccaaaagcacataaggttaattttttgaaatactcaaacattgaggaaacagagtctggtcatggtaattggaacttttgatgtgcccactccagtgacctgttcatgcaaaagccttaagtaagcaggttctggagccagtctgtagcagctctcttcactttgagaatgtgttgatggattaaagcagaacccaaacagtccactatctgcctgttgctgtgtaaatgagaacccccttgatttttcttttttttaaaggaggggaaggtgtaaatatcaatgctgggaggtaaccagattagcatgaaacagagctgccattttatactatgcctcattcaagtgacagtcattcaagttgcattttttttcatctcctgagagttattatgaactttctttactgagtgttatatttaagccttttgaatagtttgctgtctgcaacagtggcggcagataaggaatgctctcagaggatctcactgtgagacataatggtgaaatgctgcaatgcatggaattttatttgggactgcaatttaataaatgatggactatctctaggtcaaatctagtccagatcagtcactaccatctgtcaccaagctacagccaactggcagctggttggtggccattatgaaatccattagtaatttcagttcatttcttaattaatggacatacttatgcacagaacattccataattgaccattttcttaagtggcttcattctgttcctgttttaggatggacattctttgcctctgaggaatatgtcttctagtttgcagttgctacagtggagataaagtttcttctatctctgtttatgcatatgtgtacaatctgtgaagggatggtagctttgaaacttcattttacatagcttgaagttgaaaatatgattcccaatgagacttttagagttggacacatttcaagaatgtcctttcataggagattttcgtattgcatccatatattctggtcccagatgaaagaagttcttatagaaaccttcaaccaaaggaagaaaacctatccatttaaatatgaggaaagctggcctgtgtttggaccattctcccagtaattttttttttttaacgtctttgaatgatttcgtccaccacaaattgacagggtagaggacctcctcttttggagttgccaacaagcacattttgctaccagtcaactctcctaaataataagtatgatgaataacaaccaattggggaaaatttttcagcataaaaaaaggctgacagctgtgaaaacaaagcaagcatacagctcttcaatttaaagaaatccttgctcacgcttatactataatgtaggggagtctcttggcagagtcatattttgctctatttttacataataaatacacatataatcaagtgaaaatagaccttggtgcagtgctcagccattcccatgctgtgacgatatagttcatttaaatgctccttgggaatgttggctcattcaatgagaaaacagtcagttttagaccaaatatagtcaattccaaaaagcagtcaagccagttgcatgaaaatggacttttttgcttctccactggctgttttcaaatcacatttggctcagacagaaaatggagtgagccttctaaaacctcatggtttgtccactatagctttattttattattttttactgatacataatagttatacatattttgggaaatacattttaatataatgttcaatacctatctgtttcttctctaagctgaattaccatattgctacttctgttgtcttatcatatcttttcaaattgcccctttgcggtgaagtatttctattttcttggtcaataaaatgtctgtgtgacacattgaagcgatatccttcaatctgataacattatttataaaccctataaatcataaacaacatctgtactctcaagttatgtttgccatctgaaatgaatctaccaatagtgctgtgtaagtaatttgcttccgagatcagctagcttggagtccaaatacagaaagcaaactggcagagttttcatgaacattttttacaggactattgaaacttctacttaactaaaatgacaaagtgcttccaaagctttgtgctttgtgaaactggaggtcatactatttcataagcacacgagatgcatttatgtgaggctggaccttaggcactcagctggctctgtatacacaatctccaattttagcaggaggtaaaggaactagaatcttggtcccaccatttccttgtgacctttgaaactgacttgacttctccgatttgagtttcctcagcagttgacacgggtttgaaagcagatgatggctgtgggagtggctgcttctgtgcccactctagtggtgtttagcagtgttcttctctttctccgtatctttcccctttccagcgggtgtaggggctgcggctttttctttcttttttgcgtctatttccagaaatatacaaaatgcacgaattcctcaaccgataatgcagcagatgactgcttagcctctggaatattctgtctccttgaagtcccagttctctaaagaagaatgaggtttactttgacttaactggaacagcttctgctactaattccttctaatggactcctacttgtgattctgactttgaattaaatcacgaaaccacaggaaatctctaatttgtttttaagactttttggtgaaaaaaacaaaagtatgactttccaggaaacactagagttacttgtttttcatactatatcccattaattcagacacatattgaagatattcagcccttaaccactatacatcataattgtctgcttactgtctgcatcttcataatatgggatctcgttcacctctatcaccagttcctaccacctagcaggcccttggaaactgctggttgaatcaacaaatggatcaatatttgtgtatttcctgtctgtttctcaaaaggattcaaggcagtttataagaaacacatgtgaaacagagcaatacaattaagatcagaaaaaatgagaccagacatcatgtgaagaaaatgaaaagatatttatgctaaggaccaaggcctggtatgagatcatttgagaactggacttaactctaaattaaggcaaaaaaaatgagcacatgattgcctatactgttcccttaatcggagaaaataaaacatacaagaggaatttcttcacatgggggaactatcaagtaggagaatattgcaaatgaccattgccacatctgaccctatttgtgtctatgtggcattcttggtcatttctgtctcttattaagaaagtctggggctttgggaggccaaggcgggcagatgacaaggtcaggagattgagaccatcctggctaacgtggtgaaaccccttctgtactaaaaatacaaaaaattaacggcgtggcagcgtgcgcctgtagtcccagctgctggggaggctgaggcaggagaatgacatgaacctgggaggcggagcttgcagtgagccaagattgcatcactgcactccagcctggtgacagagtgagactccatctcaaaaaaaaaaagctctgggggtctggggttaaatgtaatgtcctggaacctgagatctaagcacagctagtggtttactgttctttttctgaaatcagtacagtgcaatttgaatatgtattatatgtaagtttttatacataatatatattttaaatatatgtatatataaatatacacatataagttacatatgtatatttatgtcatgcatgaaagctaaatttctgtgggaaccaactctatatcctttattttttaaaaggtcaaattagaaacagataaaactttaacaaacattgctatttaaggtttgaggaaacaaaaagtaaattccttttaaacatctattctgctgctgtagaaggggactttgatgcatttgccagtagcccatttttatagccatgtaaaaagctctagaagtactcaaaacagttgagagttagaaatgctggacaggaggagtgcttgctgagacaggagctgtcgtggggctcttttcagatcctgttccccacttctcattgaggcctggccttgctttctcttcccaggacttaacacatatggtagtgttctcaagcggttatagaatgtagaattttgctactgaagatgagttcaggaagcatcagcatcacctgtagtctcaggaatgcagaactcctaagccaattctctagaggatttttatacattgctagtgtgccaagcagtaatatagaggactctttattttgaatgaataaatgaaaaatgcgagaccttctttctttagagtatacttttatggtatgcattatctgaaactatcttctttgaatcctaatacccaaatgacacaatgcgttttccgtgaacccttgcccacttttaatcttttgagtttctgcatgctcatatttccttttaaagtttctccttctagttgaaactctacctattacgtaggtggccaacataacacattgagggtcataacagacattgagcagtagggacctctattttctttttttttttttcttttcactctcttttaactattcaaattcactagtacatttgtcccctatgaggaagctgatatgcttcctcctaatggtaatctcttgaaaccctatagttaattgtttatacctaccttaaaatcccgtttctcagcagagttaatacaaatctgtagttcccagaatcactgtgttcttgatgaaaatcctagactcttttcatggagaaatcggattttgcctatttatcttgcctcaaacccttttatagccttgatttttaaggatttttttttagacaagggacccaccagaaagagtaagtgagtaaagaactttatagagagggatggcaaagagctcctagcgaagtattagagaatcttgcaatcaggaaggcagtcattagaagataatataaaatgagtgtcaagagttttggccctggcaccaggctgccccaagtcgggaaatgatccatataaaatctcaacacgtaataaatactcacttaatattagcaattacagttaactcttgaacaatgcagggattaggttcctacgcaggaacggtgtcaggacaaccacgttgtattacttggagtccccaaatactgtattactagcctaccattgactggaagccttaccaataacaaacaatcactaacatatattttatatattatatgtattatatactgtattcttactgttaatataaagtaagctagaggaaaaaaatgttattaagaaaatcctaaggaagataaaatatatttactattcattaagtagaagtggattatcataaaggttttcattttcagtatcttcacattgaataggctgaggggggagcagaaagaaggggttggtcttgctgtctcaggggtggcagaggcgggagaaaacccatgcataagtggatccgtgcagttcaaacctgtgttgtccaagggtcatctgtattacccaatatgtactaacctgcatacttaagacacttaacagtttcttaggtgtttataaaggccaatatcttatatttcagtgtaatcacacatgaagagatattacattcagagtagggtgaaaggaaagctgaggcgccgcaaccgaattgccaggtctgttttgggagggcaccgacaatgggttggcttaccgccaccgtgaggacacacactgtacctgactgcacaggtgctgcttggaataagaattttcgtgggaggaacaagtgtgatcatcagggaaggggttagtacccgtagccaaaggactgtgcactaagacaacaaagaatgatatataaacaaagcacaacatttgcatggcaggagaaggatgaatggggtacttaagcaaagctctcgagacagagtagtgtgtgattgaaaaggctaaaatgactatgtatattgtgtttggagaaataggtgaggcccccatgggctgtcaaataatgactaatatattagtagtcatgctatcgtgttattattagtgactcctttgctcactgttagctaaggcagttactttttctctatacaaggatttcttgacctgtgagatttcctttttttgcctttcacggtacacttttcaatgctatgtacaaaggtgtcatgatttgtttagcaggaaatctattattattgtcccctggaagttattcttcagcttatccaaggtatacaaattcacttttgcatttctaagtcgcagttgttgattccctagtctcagttgatataaagctgtagcattttggaaactgtttgccaagcatctttcttcatcttcagcagtggaatctagcccattggaccattctcctctcttgtaagcaatttttatttagtcaagttccaaggccctgatagtttttttatgatataccttcatttattgacaaatggaagactattccacctaaaacattgttgtgtacttcatgtctgatatctgtgctgaagctcagcaagaaataactatatctcactatacagccatccagttcagattagaactgagtttttcaaactttgatctttgataaacaatgtacctgtcaatttaatgtaactttttgtctaattctgaatgcataggtcataaagttgaaatgtttagtaactatgtgcagaaagagaattttgtaaacctaggaaaatgctgtagttctagtgcctattaagaaagaagtgttaatttcctttcagtttttccctcttaatattggggattagtttattcatataaaattacattatgcatttttacttaataactttctcatgttgttaaacaactttgtgaacataattttactatttcctcactgttctagcatatatctgtgttattatttatttattattctagttttagacaggttcttaccaattagatactacaagtattctgagatgagcatttttatgcataaaggtttttttctttgttaaaattatctccttaaaaaagatgaagaatattaggattgtttagtcaaagagtatttataaagttctttgtatatatattgactaaacccattatataaatttatacctttaccttcaaggtaaaaattatatgtctcctttcacccttgaaagttatgtccttattaaggatatacatatttaggccaggtacagtggctcatgcctgtaatcctagcattttgggaggctgaagcgggtggatcagctgaggtcaggagttcgagaccagcctggccaacatggcgaaacactgtctctactaaaaatacaaaaattagccgggcatagtggtgggtgcctgtaattccagctacttgggaggctgaggcaggagaatcacttgaactgggaaggcggaggttgcagtgagtcgagattgcacctttcactccagcctgggcaacagagggagactcagtctcaaaaaaagaaaaaataaaagaatatacatatttatatgttataggtagatggtattttattgttgttttagaatagcctttcttccattacatgtatttatataggactaaattggaactgaatgaaaggaggactttcttcaaatacctatctgtgggaaatgaaggctttatgacttgtctgaaaaaatatattttttaccttatgtaagtgatatagaagacctgggaatatagctgtctcactgcagtgctcttctataggtccagtctgtggagtggctacataagggagacatcttgatgaagaagactttatataacaaaacaataaccataacggtaattgcaataacaataatctcagctaaatttgtttaatgctgtgtgccaaatgctcctcagtgttttgtaagtcatataatcatctcaatatccttgaaagcaggttaaaattcctatttacagataattaaaccattttgacaagtagctgggctagaattttaatcagtaaagtctgactctagagcctacagtcagacactacactatgatgctattactttctcttttgattggatccaaaatgaaattcattaatatttaattctagtctgtgatacctaatattatttactccaagtcaaaccaaatttattagtgcttgctgcgtgccaagtagtggataagtactccaacatttttgtttgtttgttttagccatcacatattaacacttgtatgtatcaggtactgtgctagaggctagggatataaaggtcagtgagcatgtccccttttctcagggactatatgtccacagattattggaaaccaacatcataaattctataatgtgtgtagcattagaagaggaagcacaatagatgttctgagctgaccaaataaagcttcgctaaaatagtgccatttaagtagagtcttgcaggacacatgtttgcaaagaagataacattggagatgtggtagaggtggtggtgagtggaagcatattaaaaatcaaggagattttttgaaagagtgtgctgttcaggaatctacaagtgtttgatgttgcatttgggtgagatgagatgagaaaagtagtccagggtgggaatctgagggcctttggtccatgctaaattttggactttatcttgtagaccaacagttacaattcagataccatcagatgctaggcaaatgaaatcagtgagtgaatcatactgggtaaccagcagagagagtggtgggtactatggaaagcaggaaaacacacgccactgctaaagagaagagctgcctctcagctcatgtaggttgtatccaagggtctggttgcatccatacccttttatttttcatggaaattcataaatccgggtttgtatgtgaaatctccaaattttcaatcttggcaattaagatggaaaatgattataaaacactgtgcaagccagggaaaatataaacggtgcccttgggctgcttggctcggtcctgctaatacagagggtccagggaagaacatgaagcaggggaatgacgtggttggatttgaacacaggagagtccattcagatagtattttgttttgtttttgagacggagtcttgctgtgttgcccaggctggagtgcaatcgcatgatcttggctcattgcaagctccgcctctcaggttcaagtgatcctcctgcctcagcctcctgagtacctgagattacaggcatgcaccacaggcccagataatttttgtatttttagtagagatggggtttcaccatgttgaccagactggtctcaaactcctgacctcaagtgatccacctgcctcagcttcccaaagtgttgggattacaggtgtgagccaccatgcccagtctatttttattttttaatgacaaataataatgatatatatttctcacatatgctgtgatattttggaatatgcataaattgtgtaatggctcagttgagctaattaatatctgcaatacctcacatacttatttttttgtgggtgagaacacttaaaatctactctccagtgagtttcaaaatgcaatacgttattattaactataatcaccacttggtacaatagatctcttgaatttattcctcctaactgaaattttgtgtcctttcaccaatatctctctaccaccctctcccttgggtcctggcaaccaccattctactctatatttctgtgagttcaacttttttagatctcacatataagtgtaatcatgtgatacttgtctttctatgcctggcttattttacttaggataatgtcctccagattcatccatgttgttgcaaatgacagaatcaccttctcttttaaggctgaatagtattcaattgtatacacacataccaatggacacctaatattgattccatatcttggtattgtgaataatgcttcaatgaatggacaagtaatagacttggtaaggaatttaacttgactgaaggacaaaagtggcaagttgttagaaagggcaaagtcaaggagacttcccaggtgtgagacatgggagactgagtgaatgggagtgctagtggttggtagggaatttgggaggagcaggtgtgagaaagggtgagaatgagttttgggtggccctattgactttgacagtttctcaagggtgtttaggtgaaagtatttcaattcatctaattatcttaacgaggctacatggtcgaacataatagtccagtttttaaaagtgcagagacagaagtccagagaagttaaaagaattttactcagtccctctcatctgattagtggcagaaccaaaattggtaggtgttccctctactagtccacaattattttagataagatcaggatcctttgaaatacctgttcctcatctccttatttaggttttggaatattcttatttataggaaaaaacagcattatcaattatgcctttatacttgaaagaaaaacccaagaaagtcaatttcaggaatcctcagaaaataattacatcttagaaatgaattgaaagagtgaggatagcatgaatctgcatttacatggtgcatacccaccccaccctaggaatcaccaacctgcgcctgagttcaggtcatttgcctaaacaaatcgttaaagtggaagaaatgtaaatttggtgtgaaaacagtatttggttttaagtttttcctaagttattgagagtggcaaagctagttccaaaagagtgaaacataggatgaaaacaataatatttctttatgaaaatagctgcaatagaataccatctagttgacttcatcatgattatgtgctgctcaaaatattcctttctccattatgtagcaagtcagtctcttttggaccagaagattgattccggtctttgttttttaaatggaggggttatttgtttagataggggtacatgaattaaacagaattctagctcctgataatctatgaggatatatcttgggagctaggatacagtttgttttagggctgctgtaacaaattactacaaaccggactgcttaagacaacaggtattctctcacagttctggaggccagaaattcaaaatgaaggtgttggcagcattgcactctctatgaaggctttaggggagaatctttccttgcctcttccagcttctgaggctataggcattccttggcttgtggcagcatcactccattctctgtctggctggtgacattgctgcttccccttctgtgtatctgtgacatcttcccttgcctctcttatgagaacacttggtgatggcatttggggctcactcccttaatccaggctaattgcaccattttaaaatccttcatttaatcccatctgaaaagactctttttctaaataaggtaacataatccaggagtgggacttgagatctttggatgaccattattcaacctgttataggcagtgtaaggttggattcaaggactaggcaaagtaaggtgggcatcggacatagggttcaacttcaaggaaagtctttattgtgagcaaaagcaaaatgtccaaaccagagtggcagtgtcaagtgtcaggcccaaaagataaagcatggatctgaataagaagacacaccacacagctggaactcagaaggcagcactctccctgatacttaagcagggcagaggcaggaaccacttttctggttgggtgttgagatgtgatagtgtgatatccatgtgactatccatgctgaaacagtgtgtctgtaaggcaggttgatgacacctgattgaaattgtgagccaacacgcctgtaatcccagcgctttgggaggccaagatgggtggatcacttgaggtcaggagttcgagacccacctggccagcatggtgcaaccccaactctactaaaaatacatagtggcgcatgtctgtaatcccagctatttgggaggctgaggcaggagaatcacttgaacccaggaggcagaggtgagctgaaattgtgctgctgcactccagcctgggcgacagagcaagacttcatctcaaacaaacaaacaaacaaaaaagaaattgtgagccaagtcagctgggaacacagatgtgtctgagagaagctcaggcttgactcctgactggactcatgtcactccattttagtttctatgtatttccatctctacccctctgccccacactccagctagagtaagccagaattatatatacatgactcagccctttctccctgataacatctcttggcatatccaaagggtcacttgcccacaaagttatcagtgaccctgctctacttatcagtattatctccctcaggcctggtcacacaggctccttcctaaaatagttctccttaatctcctggcctagagcaaacatgcatctatctgcctgcaacaagcaaagtatttccccatccacacaaattcccaggaaaagcaaaccaaaatgtaaaatgaaaacactgagtttattgaattttaggaccaccaccttagtgtttttaagtcttagaaacgtgttaattatcataatggttctggcctttttgagcctgagcaaatttttggcataatgaatcaggcacaaggaggatgtcatgtgcagtgtccgtgtctttctgtagccacaggactgtcacttgattgttccctgtgtggttatggttctctagaatggttgacataaagcaaacaaatgatattgcttcctcatggcagaggactaagtaatcggcacatttatcaaccgctgcttggccttgtggctgttcagatattgtatgtgccacgacatcgtttcctttgtggcttcctgatgctgaaaacctttcctggttaaacttctatcatactatatcaagagtgataatgagtcttaaacatatttggcatgtatgactttattaagaaaatttgttaaggaagcagatgttaatgttttgttacatccttcatattcttgtggacttactaagggaaagctttgctacatcaaataaggagatgccttgttgcaattcgatcccaaaggagatttaatttcagtagagtttacaacacattaccctcaaggagacagagagaaaggtctccataaaagattacttgcatcttactatacctaattttctcagacagcacttgcaccagcagaagaaatgacaaactgctaatggcaataatttggaatagtctgtgtccccaatgactcttttttcttatgtctgtgttgcactcagatcagcaatactagaatcttattatagtggaaagtcgtactgaacactttagagacagacacaagtgtggcagaaagatcataggctctgctgtcagatagacaccttttaccttaacttacattattactcaagtcattttacctcctcagatctgtgtcttcatatataaaatagagataataatgaaaaatctgtttcactgtgtcttggcacatacaaattgccacctagatattaggcaagtgtcaagtatggtcctctcacactcactctgtccttgctttacattcatgctggttggactgtccacccctgacaagtcacacagaaaactctgccaactcagagaatccatgtgcattttttttttgttatgctgtatttttgtccaattgactatttttcctccttacacttttttgttactttggtccctgcaaaaaaatagaatggttggcagacatttaagtgatgagttcttgatcaacaaatgaagagtaataagaaaaatgtttgcctcaatggcttctgaagaggatgaagcatcacttcattaataaagtagatagcttctgcctcttagactggactcccaaattcttgcctagaatcttcagtctctggggaagagaggactaaatccagtcagaaatatagtatatatacaacctcctgacctgttcttaggactaatcaaaactcacaggtgtcccactgggcaactagaaaattcctaagaatgaaggagttatttggttcttgctaagtgaagacagcacacacaaaattactctgctgaccaccactcggaatggttcctttcacagggctttgtggactcctgtgctggaggggaaagaatgctttcttaacttgaaagtttgtagtttggttctgggataacttaattaaaggccccactgccaagaaggatagaattaaagatgtaagtcgggacttcgaatatcctgactttaaagttcataaatcacctttgtatttcactggattctgttgtatttcctcttttatttaatagttgttatttttcgtattttctggactacttagtcttgggaaaggttggaacaccaaattaagacttcaaatgtagcttaaagaggatacagtgacatctggagaacctctgtttctgacaatatgggggactatatgaccagagaaatcctgccagtagaaaaatgattagaaaacatgcatgcagagaagcaagcactagaaccagcatttgctaatactctttagcttagaacctgaactttatgggccataagaaatgaggatattacaagaatcctgaagtccacagtaggtgggagatagaatagaaacttcaaaataaaggtcggacatccaaaagtcagcaatgtcagtgggtgaactaggtaaaaaacaaaacaaaacaaaaaagaaagcaaacaaattttaaaacctgtcattgaagactgaagaaaaaaacagtagatattctaacctgttttgaccatggttcttgaaaatctctcatttttctggggctaggagatgagctatctacaaatctactgtcctatatataggacagtaattaattctacttggcccaaaaaccaccaaacagaaaattaagtttaatgtggttctatttcagaggtgcccttaagcacttagaaaaacagaatgcaaatcatctctggattaagaacaactgcacagcaaattaaatggtagattagatagaagagagaattcatgattggatacatagatctgaataaattaattacaactcaacccagagagacacacacacacataggaaatacaagagaggcagagacatacagtgtgatcacatctaatatatagctaaaatttgcattaattttatatatgtaatttatcaatatataatatatcaatatataatatattataatatatcaatatataatatattataatatttatataatctattatatcttataatacattatatatacatttatgtgtatatataaatgtatatataactgcagttccaggggaagctagagaaaataggcagaggcaatattttaccatgcttaggaattttccaaaacttttgaagacataatttttcagactcaggaagtcctaaagactacatggattcagtaaaaattaaatacattaaataaaaaggtatttaggtttagactgatggtggttaaactgtagaaaacagaagacatagagatctttaaatcactcagaggaaaaaaatacagattacctacaaagcaaagacaattagaatcatggctgacttcttgaaaacaatagtgaaactcagaagacaatggaataatatcatcagtataccaacagaaggttaactgtcagcttagaaatgtacaaccaatacaaatcttttagaagaaagaaaaaaaataaagaaaaaaatatctttatttggaagcaaagtaactttggggaaaataaaaccaacttactaggagaacttactatgaacagatgagtaaggaaattctaaagaactattctacaggaagagagaatatagccactaaaggaaagcctaagataaaaaaatggggatcaaaaattagcataagcatacagtaagctaaaaatcattgattttgaaaaacggtattgatactaatgatttccagattaaaaaaatagaaaaccaaaatgctgaacccaattgcaggtaactgtggttctcaaactatgtactgaggcactcatgacatcctagtgaatgcgcaggggcactgcaggatgtttatattttctagggaaacagggcaatgtatattggacacagcacagagtgtcctcaagttcacagcttcgacattgaatcacactacattcctttgataaacacatttgatcaaacttggtttttggatggatgttgctatgaaaaaaatgcaagtaccaagagaaaatcaatataaaacaagaaatatggatggagatatctgattcaattccaagatttaagaagttttactgtgcctaacagatgtacatatactgttagaaagtaatagtggctaagaatcaaataaagattttttttcttttattataatttatgtctattattttttcaaatgaccactcagttattaggatatgaatacatattgtttttacttaattaataaacaaaacaatactacttaatacacaaaacagtattcctttttgcctaagggcattatgaaaaatttacagagacagaaaaaatgtggggaaccaagaaagtttgaaaacatctggcatataaattggtagggggataactggatcctggcatataattgatacggggataactggtattgattacatttttattttgttaagttaaatatgcatgttaagacttctggaggaaaaaaaatttcgtcttgatataaaaattagccaggggtggtggcgggcgcctgtaatcccagctacttgggaggctgaggcaggagaatcgctataacccaggaggtggaggttgcagtgagccaagatggtgccactgcactctggcctgggcaacaagagtaaaactccgtctcaaaaaaaacaaaaaaaaaggccgggcgcagaggctcatgcctataatcgcgcagatcacgaggtcaggagatcaagaccatcctggccaacatggtaaaaccccgtttctactaaaaatacaaaaagctgggtgtggtggtgtgcacctgtaatcccagctactcaggaggctgaggcaggagaatcgcttgaactagggaggcagaggttgcagtgagccaagatcacagcactgcactccagcctgggtgagagagcgagactccatcttaaaaaaaaaaaaaaaaaaaaaaagattatccttttgatagagtatatatcttcaaactagtaaatgtgaggaaacaatctcaatcaatctcaaacacagcaagatgggaatttttttatagggggccaaaaataggcactaagtaagattctaagatgaattaaaacatgtcaataatgtcaattcatgtaaatgcagtaaacttttcagttaaaaggcaaagatagaataaatcctgctattttctattttcaagagatacacataaaactaaaaacttagaaaggttgcatatatataggttaaaaatgatgtttgaagaacatacaaaccaaaatgaagccagtgtagctttagtaatgttagatgctaccgactttaaaacaaaatgcattactgttcaagtcacctcatgtcaataaaaatttgaattcacctgaaacagataattattctaaaattgtacaagtaacaaacaattttaagacaatacatttgatcacttactgcagttgtaagtgatcagattaatggagaaaaattatatgatcctcccagtagatggattaaaagccatttgctgtaagtaaacatctataataaaatttctcatcaaactaggaatagattctataacttgataaagtatgccattattccttgtcacaaacatactcagtgatgaggcattaagtgcatttcctttaaaattaggaacaagataaaaatgttttctactaaaactctattcatcaatatatttctagctgagaaaataaaattgagtcccctctcacattatacccacaggagaccataattaaaaaaaagctttttgttttgagagaattatagattaacatgcagtgataagaaataatacagagagatcccatgtagccctgttccccaatggtaacttcttgcaaaactataccacaatatcacattgagggcattgacattgatatagtcaagatagagaagagttccatcaccacgaaaatctctcctgctgcccttttatagccacatgaacctcccttccctccactcccatttctcctctaacttctggagacccccaatctgttctctgcttctagaatgttgtcatttcaagaatgctatgttcaatgaaatcatatactatgtaatcttttggattggtgtttttcactcagcacaattcccttaagattgacgcaggttgttgtgtgaatcaatagtttgttccttttcattgctaaggagtattccataatatggatgtaccatagtttttcctgtttattttcttatttaaatatttttcctgtttattttcctaaattttatagttaccattttccatttaaatctatgatccgttttgaattaattttttacaatgtgagctttatgttgagtttcttttttccccccagctccagtacacatgtttcagtgccatttgtcaaaaaggctgtattacttcctctattgcatttgtacctttgtcaaaaattatttggacatatttgtgtggatctatttctgagttctctgttgttctattgatttatgtgtctgtctctctgccaatatgatattctcctagtacctgcttggtgtttagcagttatatagtatatcttaatatcagatagagtaattatctctttattatttttatgattgtgtaagccattctgaggctgttatctttccatataaattttaaaatgaactttttaaaaagtttacaaaaaagctttcctgggactttggtaagaattgcattaaacttatacattttgggagaattgggatctttactatgttgaatcatccagtccatgaacatagtatgcttctccacttgtttaggtcttgattgatttctttcatcaacattttataatttccagcatacacagtctatacatttttttgttgtttatatctaagtatttcattttatttttagtgactattaatggtgttgtttttaattttggtttgcacatgtttattgtcggtatacaaaaatatgattgatctctgtacattggtcttgtatcctaagaccttgaagaagtcatttattagtcctaagagtatttttgtatattttcttgacaatgtggacaattgtgttatctgtatgatttcttcctttttaaatttttcttttaattttttatatttgttccttttatttttattttatttatttttccaatctgtgtgccttttatgtttttcttttcttgattattgcagtgtctagaacttctagtaataagtcaaataagagtggtgggagcagacatccttgcctcattttattttatttttattttatttttaatttttattattttatttttattattatttttttccttgcctcattttcaatcttagaggaaaagcattcagtatttcaccattaagtatgatgttatctttagattttttgtaggtgctctttaaaaagttgagattattcccttcaatccctaacttgtgaccttttattatgaataaatgcatcaaggtttaaacattttataagaaaatttaggataatatctttaacacttaagaataggaaataatttttaaaatatgtcataaaaagcgaagaacaaaaggaaaatttcagtaagtttgaaaatgctgaaattaagaacttttggtcatcaaaacataatacaaaataaatgagaaataaagccataatttcaattccagtattttcatgtaccaatgaagaattcatatccagaatatgtaaaaaactcatacatgatagcatcctggcatggtggctcacacctgtaatcccagcactttgggagatgaggcaggcagatcacttgaggccaggagttcaagactgtcagataacatggagaaaccctgtctctactaaaaatacaaataattagccgagtgtggtggcacaggcctgtaatcccagctagtcaggaggctgaggcacgagaattgcctgaacccaggagggttcagtgagccgagatcacgccactgcactccagcctgggtgataaagtgagactctgtctcaaaaaaaaaaagaaagaaaaataaaaatataattaagccagtagaaaagcttcttgaataagcatttcatttaagaggaaatgcaaattactattaagcagggaaaatatactcaacctgattagtaattaaggaaatgcaagttaaagctttaataagataccatttcacagtgatcagattggcaaaacctaaaaactctgataatattaagttttgctgagatataaagcaactggtgggagtgattggtaagtgattaaggaaaattatttgtcattacccaacaagtgaagatatatttaacactatgccatagcaaatctagctctaggtttataccctagaaaaattgttgcatgaagagatgggttaatggcagcattgtttgccatggtaaaataactggaagctacctaaaagcagagtcagttaaattatggagtatttatacaatggcatacttcatattaatggccatgattagcctatggcctcatgcctcagaatgggtgaatctcagaaacaatgttatgagaaaaagcaagtcagagaagcatatgcttgatttcattgaattaaatgttataaatgggtgaaatccagaactaaatatttggagtatatacacactgatacaagtagaaaaaaagaaaggaaaagattaacaaaattcaggagaattatatttggggatagaagagggagggactgggtacacctgggactttaaacattttggtagttctgtttctcaggctgggtgtttggtgcatgggtgttcattttattagtctacattaagctatatatacgtgtgtgtatattatgtacattatatgtatacacactatatatatgcacacacattatatatgtgtttgtgtaaattatgtgtgtgtgtatattgcatgaccaattttcatagtttttttaaattagagaaaataggaaaaaggctatgtcaggtgcattcacagcagaatgaaatttagtaacagtgaattgtttcaaagaagtaagataacaaaaaaagtcagcttttacatgtgatcttcattatctaagtcagctgtccccaatctttttggcaccagggccagttttgtagaagacagtttttccatggacggggatgggggatggtttcaggatgattcaagggtattacatttatcattagattctcataaacagcgtccaaccgagatccctcacatgtgcagttcacaataggcttcccgctcctatgagaatctaatgctgccgctcatctgacaggaggcggagctcaagctgtaatgctccttgcccactgctcacctcctgctgttcaggtcacttcctaacaggccaaggaccggtactggtttgtggacccccataccatggaccatggtaccggtttgcggacccctgatgtaagtaaagttaggaaatttcatgtcaatttgttgtcaggaatttatgttatttttgcattttttgagggcacagttttcagaaatagttgaattaactttttaatatattcactgtaagttttgccttcagttatgtaacctttcaaatattattccaaggttgttttcctattatgctaaaggaatgactaaattgctaaaatgggaaataaaataaagaatattactccagtgttttttgcttagtaagatattgtgtgttttaaaaatggttttctgagtattcttaatgaagaagaactctgtaattgttttcttcaagtttagtagattaatttcacatgtataaatgtgcatgcccatgttttttggctttcctttatcgataatgaccattgtccatgcagagcttctcggcatggcctctggagtgtcttaaaatatgtacagtgtatatggcagattcaagatcagctggaagctgctttagaaaactgaagaaattgcaaggcaacactagaacttgatatctaagttcctaaaaatgactgtattttggaaattcagtaaaacagttttgtgtctagagaactctaggcattcattaaaagcttaaaataagagcactctcccccaacttctataaaataaagaaaccaaaaggaagtacctgcaatttactcagttaattcaatttaatttaaaaaaattcagtaaatgttaattgagcatctaccagatagtgccagataacattcatggcactgggcatatagcaggggacaaaacagataatattatgtaacaataacagaccagtggtttctgcttaattggaaagtttcccttaaaaggcagtaagcttcttgagggcatgaccttgagttttctgtgacccagtttttcctcagcacttaacaatgcctggcacattagtatgtatttaatgcttattattaattattgttctttactgttagtacatttaatatgtgttcaatgaatgtaccccaaagccacacatcttgtacctgatgaagccagagtttgaacccagtctattggtaacaggaaaaacagttgccgcttcttgtgagcacactctgcaccagggcctatgctcagggctttatactcatcattgcacttcgtcccttagaaagagatattattatcccctttttactaataaagattctttttttaaattttctatttttaaaattttttgaatatatatttttgaaacggagtcttgctctgtcgcccaggctggagtgcagtagcacaatcttgactcactgcaacctccgtctcctgggttcaagcgattctcctgtctcagcctcccgagtagctgagattacaggcacacaccaccacacctggctaaattttttttttttttttttagtagacgcggggtttcgccatgtcggccaggctggtcttgaactcctgaactcaggtgatccacctgcctcggcctcccaaagtgctgggattacagatgtgggccaccacgcctggccactgatgagggttttaagccttagactacttaaatgccttgcccaagatcaccctctgggtccatccccttcaaatacttccaattttcacagcctttgtatctgtggtgccagagtatccttggctacctgcaatggtgcagctcagtgtattaactaataggaccacatggtgtcatgtaatctgtttggctgattttctttccccactaaagtgactaattttttttacagaattgaccacatcagctagttattttaatggtaaatcaaataaagcttttccatttttttttgtctccaactgccagaacctggctaaattagacacacctaaattataatccaagatcagccatttagtaattgtgaaatcttggacaaatacttagcccctctaggtttctaacaccttatcagtagaggtgaagataataattcctacctagtctggttaatgagaggattaaatgaataaagctttatgtcctaacccaatgcctgacccttaaggagttttgctgagcagcacctgctgttactacatttatcattgttatttttaaccttaacatctaatttcaacattatctttgttctctggtctttactaacctccctgacctaagtcatattatcttaatctaacaaatcaccaacttctttcaagataggcagagttacttacttgctcctctttggatttgctcctttgttatggagcttaaactgtgttataacaatttatatgactgtgttatgaaaaagatctcttattctgtaccctctcttctaattacatacatttttaatgcaggttcattcatcttttcactgccagcttcttcattttgcctagcatataagtgctatcgtgtttgttgaatgaataggtcatatcattatccacagtgaatagataggtcagttctcttttgtacattattgctaataccattgatggtattactttgattttgatatgtgtaaggacactgtagtgtttacaaatatcatttgtatatgtaatttcatgtcttttcattagaatattcctctctcactttccataaatattttcactgtctatggatttttattttttgcattttttgtcttgctagtgctatattacaaatttttttcttctgccatttctgccataggactttataaaaagactttcttactttcacttaaacttttatttcccacgttactttaaggtatacattttactctttccccccatcattaatacattaccacttgactctgtcattaggctgtcaatctgtaaaacgcttgagaaagaaagagagaccttattttaaataggcctgatactttgctaaagaggttggcgcactgactacaattctattcttgtcaagaataggcttttgaaatttcaaggagaagaaatggaatttagaagagctactaaaccatgaaagacctaggaaggataaaataagtaaaatgaaggagaaaacagtaaaatccaaagacattgctaaatggacaaaattcactacaaaattctggagaaattccctgccttatattgaaataactcaatatgcaacaaagaatgccctgaatggccagacctagcaccaaggcatgaaactctctttaagccatgaatatcttaagggaaattatagcagttaattgttagtggtcagaaaaacaaaacattttttaattgaatttctaggttaaggtgatagaggttggggtgttggggccagatgagaaaagaacaaggaaacatttagtaaccattcaccaaaaaatgttatacaaatggtgataacaggtagttccttcatttccaatgaagtttagaggggacaaatttaatcatgtggcaaagttaagtgtcaaacatgaaagggagttgaagtgtcaaacgtgaaagggtaatgaagcaggagagatttatgttagaattcagacagacttcctgggttctgaaatcctctaatatgttactaagcagagcaggattcgccccacaaacaaggctggagagttttccaagattccaagtcattaggcagggtttccagggacagcactgccacagcctccattgttctgtgggatattctgacctgattcaagaagaaagcctatggaattgtatggacttcacactttatatgaaaaggttggcggcaaccaagcaggggaatacatcagttccttctgaacacggggctcacaccagcccatttgcctcataattgtatgcatgctacagcaaatgagaaactgcaacttcctctgccgaatgtaagaagaatttatatttttgcttaaaacggaatggttttcaatgcaaaggcattgataaggttaaagtgtcatactgaaaatatcctatatagacagcaatcggcataggggtggagaaagtacgctctttaaactgcttccgtggaaaatttcaatcaactgctagcttttgcttcacaaaactttgacgtatgtcccttgacctttaccaactaccctttcacgtttgacacttaacgtttgctacatgattaaaattcagcgttaattaatttcaacactatcagttaagttatatttagctaagaacactcacttttgtctttcgtgagtagcactgcagtgttattacaaagaggtagtcaggagggcaacagagatacgaggagagaagaatgattcagtgtgcagataattgttttgagtgaaatttagctcggtatttttgttcctgtcctcagtagaactgagatttagcacctcccgttggcatttagcccccacccccacataggaggaagctgtgcggggcgggtgctgagaacgagccacaccagaattaaattatagcacaattctaacactggcgagaattttatctggccagctcttgagtacaaacctggtgatcccaaaagaaagcatctctgtgtggtgtgttatcatcctcaatgagggaggttgacatcgttgtttaaagagcatcacccgaaaagtggtaaccattcccaaagaaaccagtggcagccagaatatttagccatagcaaaactgtagttctaaacttaaaaggtcacccgtgaagttgtcttattgatgatttattttatgatgtgactcactagaaatgaataaaacccaagaaatttgagctctctctccgagtttaacaaagtgagaaaacattttattactttctttattccatgctcttttgctctgtgaatggattatggtaagaaggtagatatgcaaatcttgcttttacctgaagctcaaaatgctgtagaaccattatagctgccactctttgggatgctggcatgaaatcgtggtctgtaagattactgtgccactgaaatacttctgtcatttagatgcacgtacaagacaggaagagaggttctgtgcttggtagatagtgtaggtgaaacacaatttatatgtaagatgcccataaatgtcttactaaggttccagtaatagatgttggattctttgggacagtatacccaggtagcctccaattgtttttttttaaataaaaaaatgtgttgcatttttatttgcgtatcacaaaacattttgcctccaataattcaacacttatgtatcagaatttggttccatgccctcagcccatccaccacctttagttggagggcactggggattttgtctttttgcttacccccagggaaaattccagccttcgtttgccagggatttaagttgcttcatttcagtactcaagtgattcagcatcaagtcacatttctcttgtcaggcactggtagaatgtccctgcactagtaactggccttagattttaaatccaagccaaagctaccttgtgttcttggtgggacactagatacctatctcggtcccattgttgtgggattaggaggattagagagagactttggggtgtatgtaggagggtatttttattactgagtgtatttagatttagtagatttaatgtttaaagattgggtttagaataaagatagtatttgatttttatgtatattttataaaagggggtgggttagtttgaagtaagtttatagtggcgtgaaagtagggatctagaagcaggataaagatagttaattaaattgtaataggtttataatttatgattgtatatgattgtttttaactaatttagatgtttattatttaggttttgttttaaagagttttgtattggtttattttataatttttattatggtgtttaatagttgtagttttaggtttgtttagtttttttatgatttttgttgtatttttagagaaaatagaatatttgaagttattagttatagagaataagaatttataaaaatatacttattgttgtctttgaaataaattaatttaatatagaaaaatttattttattttattattattttttaaatttcctgcctcaccattgcatgagaacctaatcagccctctgggatgaagtctctggcttttttactccagtatcctggaatcctgtttctgaactctagtcttatgcttaaggtcttggccaccattgaaaatgttcctggttcagcttccctgtgcttgcttctgacctgggtctcctctggatttgctgtcagctgcttatttgcttgtcacagcagccctgaatccttccacctccagcagtcaccgagccttctggatactctgatttattcttcaaactggactgactccccataccttctgctgaacagatttccaggagcatgtgtaccaccccagtgtgctgctctgtttgaggtcctatttcttgaccttggccgagtcctgccataaggttatgcaggaaaaggctgagctttaatattaggggagcatccataaatgaaagagaggaaatcatctgctatatttaggagcaaataaaaattttaagagtgggaaggtcttattgaaatgttttctagtccgtgaatcctctagtcttttttggcttcatttggtgtattataggatgaaacgttatttttatgtcaaatgtttactttcaaatgaaaatgttaaacacttctgtgttttgccatatctttctttgatgtcgactgaatagatggctgtccatgccttgcaattgaagatggttttattttgtaaattatttttctctctgtttttgccttttcaggtattacacaatggcctcgttatggagatggagcatccaactgtggggaagatttccgtcccaggtctgaaaagttttggtattttctctagcacctttctttattaattgtcccatatgctgtttactacaggtagcttatgagctcccaaacaactttccaagacattatccaaatttataacattgggtaaaaggggaatcctaggactgcactcacaaaaatgtatgctgagactatggcattgtgtcttagctctaaggagtgtcggattgccacgatgacaaaaaaatgctcgcatttcttaattccattttgtgtaatcacgtgctcacaaaagtacatcatgtaattatcaacaggttgatagtaataggtatggccaataacaagaaatagagtgtcgttcatatgagaattggaaagaaagccaggcaagatgtaactggagtccgaggaaggctactgactgctcaggctcgggcattttctttcagaaccgtggtttaaggtgtggatcttggctttacagaacaagaaactaaatgttttcagtacacccagaatagattgaatttttggaagttgattcatactaaaccagctcaccagagactgctgcctaagccgaaatgccagcttctttacttgcagagggagctcttatttcagcagccagtagcctcatgcctactctcaaagcatcctcttaagtggtgcatttaaactgcagtgagagcttgtgaccaatacatttccctcccacagcctccatttctctgataatcacaatattacctttatcagatatgttttttctctattccaggcatcgctggaaaatccacattccagcaatggagttccaaattatttgttcattgtgtccatattttctagactaaacacaaaccaagcacttatttttttttcttttcttctgatggaggtcagtgaaattagctaggatataatttttgttattgttttttcctaaaaccgtttcctggccatcttacttggaatttaggtatctgccaaactcttcagtcacctcagtcaggtggcatagagtatttacttctacaggcatctgatctcatttattgaaggactattcttgttaattttatcctaaatagaatctaagatttgggatcagctttataataatctcccataacctaccagatagtgaccactcgcgcatgaaaagagtaagaagagggaagtatgatgaataaagaaagttgaagagaaaattctaatgttcaagaacataaggaatattatgcatggattaaggaaggtaactaagagagcaggtataagcaaatgaaaaactgagatcacatgttctagggaaatgttatatggtatagaaaagtggtagaaaaaaatgttgacaaaagctaagaagttcatcagttcatccactcatctgtattactgagtatatactatgtgccaggtactgctttgggtcctaaaaatacaaaaataaaccagacaacttcacccctggccacctggaactgatacttaatagaaagttgaatgatataacaaccaacaaatgtttctataactgtaagtcataagtgcaaagaaagaaagaagaatgtgctgtcatagagaatgatggggtcagatggggccttctgtagtttaggtgatcgaagaaagtctctctgagaggcagacttataacatgacactgaggggcaaaacgaatagaggatgagcatttccagcagagggaacagcatgggagaaaaccccgaggtgatgaagtgtggggtgtgttctaagccaggatgaaaggtggggaagtggggcaggaaatgagactggagaggtagggagagcctgggggccctgttaaagttgtgttttctctcgttttaagtaggggaataaaatcacacaatttacagcttaaagccggcggtcaggttaggaagtgatacaggagtttaggtgatagtgtcttaaattagggtcatgggaatagaaataaaaagaaggggtggttaaaataaaaaatgtaatcataagtctttgagtattagatctttagaaaacatctggtctagtagtttttgatatttatacagtaaaactgattttccacatgaagaatccgtagctaacacagatggaagcagagttaggctgattgataggttagcactcctattgtttagctttcctcctctgcccaccatgctgtggtcttccacacatctctccttggaagtctgggccctgaagaaccagtgatcacttaaccccacaagtttacagatgaggtcatacaggggttggtatccccaacacattagagaaagggtaagcatttgaaagtcaatatgattgtcagcatgataatgaggaaaaaagtaagtcagtggccaaccaagaatgaactcattggaggtaacactctttcagtcaggcgtaatttgctgactttcactgtaagtgaacgaaagctaaatctcagcaggagggaagtattatttacagattactagaagggaagaatatttcttttgcccactttaatttatcaatgtatcaggtagccattgtcacaagaatgctgtgtaagaaataacctcaagctcttaatggttttcaaacataagcatttgtttatcccatgcatgtggattagctgggatgtttcatatagtttgggctcagctgggtagctttgcttctagttccaggtctggccaggtttagctcctgcctgtgcttggagtcatttctaatccgtgtgtctctcctactcttctgacggtcatggctgcagaacactggggcaagcagaaaccacagtgctatgtaagatgttggtgtacagctggcaaacccttatgcctgcatcttattagtccaagcaaattttattttttaaattaatttattttgagacagagtctcactctgtcgcccaggctggagtgcagtgacgcaatctcagctcactgcaacctccacctcccaggtttaagcaattcccctgcctcagcctcctgagtagctgggattacagggacgtaccaccacacccaactaatttctgtatatttagtagagacgggatttcaccatgttggccaggctggtctcaaactcctgacctcgggtgatccacctgcctcggcctcccaaagtgctgggattacagatgtcagccactgtgcccgggcaaaagcaagttttaggctgtatccaaaagggtggggaaatacatgtgaccctttctgagagaaatttcaaagttatatggtgaggagcatgggcacagggagaagtaaataattggagtaaaaaattcacttgactacaacagagttctcagatccacagcaatttctttctcctttttttgttttaatctccctttggaaaattctatttttgtttagtgtttatagggcttagtcatctttttggtatgtctatcttgttatcttgtattctttctatagaattatcaatatgggaattcccagatttgagatgaaatgcatgagtctagttaatgtttggaattagaatctgagtgtgttttgagtgcagcacatctgaattcctcatgagaggggaatgacaattctgcttacagatgtcagataaaaagaggctattgtatctcctaattcagtatatcccaataagaggccacataaacaggacaagagttgttaaatgcaaagggaatgtatcagtaatataatttacaatttgtctgtggattctacctgtccttgattttatttacctatgatagttctgcctttctttgttggggatgttcccattggagaactcataaatgctatagacataactcagtttcctcagaatgtctcaatatggtaagtctgccaaaacaagaaacacaagctacagttaaaggtgacttttgctacactgttttctggttaactagtggagacacattttgaatttgctagacatagttctatagatttacacatacatatccacatcttcacgtttacagtaacaatccttattaggattgttattagcattattagcattaccagcttattaccattccaaattattctacttatttatatttcctgccttatttatgaacttcttgcaaccagtactgaattttctgtatgtcacactaatttgcctgaagcactttcttagtcattaccagaaacttgtctcttaaaaacagcagtaaatcatgtgatatttatagagccttctttagagttgtataaatccacatagcattccttcagatgagagcttattgattaatacattaaagatactggtcaactcgtgtttaatatactttggacaaggataggaaattatttacctcttaaaaatcccttttggctacttaaagaaaataattatttcagccatttagtacattgtttcaatctttgtaatcattaccattattaaaatacaataagtagtatcatctaaactatttcctttattatatctgttgcaaatactccctttcatatgagtctctatcatcttcaaactataataaagagttaggaaagaaatgtaatttgtgtttacagatgatctggttaaaacatgcaaactagttaagcccatgaattatctctaagtgtgagttttagttatgctaatgctattgttctttatttagtatattattcattaaagtactccctcatctgaactttaaagcctattatacagttaaaagtgaagagagacaaagaaaaatgaactatcaatgggtgtataagtgagaacaggtattatgtgactctttgccagactctaacattctggtgttctaagaggcctcagtgagggaagtggttgttagtttgaggtcaccattagcttaatgatagaagtgtcagcatgataggcacaatgtactaatttgctcttaattaatataacctgtattgagtgctaaaacctcaaacattccctcccctgcccccgacaactaacctaactaaacttactgtgtctggtacactatttaagctctggggagaaaactggataggaccagtccctcgtggagcttatgcttggccagggaaacaggcatgaacaatgaacatggaaaagtaggttgagtgtttccttggagaatcaggggctacagctcaaggctctgggtgcacataccagggagacctcacttagtgtgtaggctgaggaaaggtttctctgagaagtgaaatgtatgcttcactttcagtgtgtaactaagtacaaaaacagtatcaatgttgaatctgtgagtggttttccacctactgtgatgtgctactgtaaatatacctctttaattacttcaggtatctttgatgacctatttaaatttgtgtacatcattgtacataggataaaatgttttcacgtttttatgataaaatttgaacaaatagctttttaatagatgtaatgatccagtgattcatcaacaatgccaatgattcttcaatgaaattatataatgtaaaaaaatgcaatcagatacatgaacaatgtgagtgcctggcaccctggaggagcagagaaagcactccagtggagaaacagggagggggcaggctcacagtgaccccgaagagggatccagaggccagaggaataagttctaaaatagagctaataatcacattaaatacaaatcaaaaaaaattcaaagatatctatgctggggtccctgagattcctactgtctgaggagtgaaggtaggacttgcgagtggagcttggatagaaaccaccggtttagcagatgttctcatggattgattttaggggtaatttctatctctgttgaagacttttgtaaaacttacagtgtcctaaattttaaactgtgaaattgatagaaatttgtatttgttaattacagaaatttaaaaagcacattaaagtttacatcacagcatttctgcgacaggagatgggccattatgtaaatttcaccttatttgtgactttagtgggaagatcttgcataagttatcacattccaaaggttggccaatttccaccaagccattcactatttgcatcttcttgcaatcacaccggtctttggcctttgagccagagtggagcatgctgtccttgcatgtactgtggaggtgccaagttagcattggtgctgagtgccaaacttcaaaggatgtcattggaatagagtttgatgtgtagctctgcagtttctcaccataacctttttcagatacttcctgtgaatgtgcattgcagtcatttgattctagttgcacttctgggaagtgtttcagtggtgagtgtgtctgtgctgtgaaggggaagcagtcttctatacatgcaaaaggattcgaaattgaattgcttctgcctgctggtcccctgatctgtgtttttcagaaagcagctccaggttcttcaatatactttatccatagtattttaatactcacatttggaacttgcagcagtttttaactagtgggtgttggatgcagagacagtagtcaccaccatgcattagtgtagtttgaatcaaattattagaatattgatgtttggattttaaggtgaatttgtataaagttgaatgtactcctctattttattatcggacacattatatttctgaatgttttgcaagatgttttgtaagtaatgatctaaaacacttctctgggtttgagacagtataccttcataagctcccagagggcaaaaatgtcataatttgaagtctaaccagcaccctgtatgccaactaggaacttaagaacattttctggatgatgattacaatggaaaactattagataatcaaaaacttgatttatgatccatttattcagtatgcattttttattaatggactggctacctgcagaagctctctgataacaatttattttacttatttagttagttttcaatttgaagcctatacattaaatggagtaactgccttgtattttccatgcattacaactctgccttttctatgctacacaagactttgccttcccctgttacttttagcttttttcttctctttaggtagaaaattagatcatgtttctgaaatcacatgtcctcaaagtgcagttaaatttctataatggataacagcagtggggaaagctgtcacaaatctcactggggaaaaagaaaaattaagaggaaccaaagtttcagcatatatctctccataaagtttaagtatgttggtgctcataaggaattctgtgtaaaaccaatgtgaaaatgaaaggtgagataagttatttcttccaggtagaaaggcctttcagatgacaacaggaaaagtgtgtaaagttttcatgttgtgcgtagtgcataatctatcttctagaaagagcatactcctttagggaccaggttaagctgcaaaaagaggaaagagatgaaaggaagtttctagagtctgtcaacaaaatgagagaaagttggcaggaaagtgaattttcaaatagactagctagggtacttcccaaagtcctcaattatttttttaccattattaaatccttaacccatggcagggtactgagtgaaatcaatcagtgtattctcaggtgacttgccattgagtgcctggagtcttctctggaagtccctataacaataaggtgggatagtagacattgttactgttctgtgagaaatgaatagcacagtgattttccttcctaggagagcagggaggaaacaaaggaggcgtgaattgcatccccaggaatgtctttccatcaggcaccagagaagcatcaggagccaagttactgtcgctgatacaactcagggatctccatcaactatgcttatctgtggcatgaggaagaaatattttgtgagacctgggctttcatactctgggaattcttatttctgttagttgggacttggaaagctgccaagagctcagttgttcttttgcaacatatcctcatcaacgtagaccctagtgggcttcccgataagtgaatgtgtctaacagacaagaaactcttattgcaaatcagccctaagttatcaatgaattcctggggtgcagagtaagttttcactactaggaagtgatatttatgctcaagaattttcctgggggaatatttaactggactcatacattctttgggattttttccagtatctctatgcagaatgatccttgagattagaggtatgttttaaataatccgagtggaccattgaatgttaacctgaatatagaaatcaaaagaaaaataaaaagccacaggaagagtaaaaggctaaatgatggtataccgtttttgctattgtgtcagaagatgtatcagaaattttcatcagttcttgattgcgttcctggtatattagctgcagccaaccttcactgagtgcacaaaaaagtctttctggatcaactttaagtactgactttacgataagcatttagggaataaattaatcaaatttaattagacatgtaaactgattagagaagtaaaaacaaatatcttacaatagctaaatacaaaagttttaaaattatctaccagtttggacttcagtatcatggcgttaacttggagaatcaagaagtgacattatctttgcctccaagtggcttcagctaggagtgagttgcttggctttatggttgggtttattcatggttggacagggagtcattttaatcctttctcaaagaggagtggctttgctttccttcagcattaccaagaagggacttcttggtgcatgaagagataaattgggctgaatttcatggaattttttttttaatgatcagtctttaagatgtcaagaagtattctgattaagaagacttagataaaatatttatctttactaagccagatggagcaagccacctttttatttaaaatgattgtagtttaattttgactaagcatacaatgttatgataatattaaaaagatgttggtggagataaagaaatggtagtaaaggggttaaagaaaaaccttcagataccttactataatcaataggaaatgtatcatatcccatttttcatatcatccccaaaccttcaggatttgggggcactgagctaggtatgtgggccttattgcttctctcctcagctggagcgaatcttatttgtcctgtatgtatcagctttaatgaaaccatatcttcatgttgtcatatctttatctgggtatggcattaacagtcagcatgtctcagtgttcctcctttgagtaagatgttctaataccacataggaaggggggcccgagggaccttgaaatgcttccctaatttgccctttatctgaacattgtgtaagtcagaatgggctgtgtgcctcttggagtgggttgccaattagtctaatctgcttacaacccttgtgtctgtttgaaatgttcctaagagctctaaatcctgggttatttcaagaagccgtaagcatttcaaacagttaagcaaaaaccaaattttaatcaaattaaaaatgaaaaaaattaatagcaggacattttgggcatttgaggcgtggatgtggtcaaataaaagtaccaagaagatgctgcagccacaaaaactaaagaagcactaccctccgtagacttaaagaatatctgcaacagagactaattctgctttctctttgttgctgggccttcaagttcatgtgtgaccttaaataactgacctcagcttctagtgccttgttttcttgttctaatgggattagtcttttcatccttttaatttaatggaaaaatgcaattcactgtgctgcatttaactatattttgtgaataggttttaatggcataattgctgtggagcattcaaatttgagaggagggaatgtaagtaaataaacatctgcttaatacttgtctatatatggtatatatatgaatactttatatacaccatttgtttcttctctgggacaattcagtaaaccatattactatgtccattttacagataagaaaatagagatttgcttaatgttgctataccaaccaatgttagtgttgcaattcaaacccagctctgggtgtatctttaatctgtcctcttttctctatttactattatctcctaaagttgagccaaaaagggaagttgaaccaactattgagtttttttttttaccttacttacattagtctctaatttaaagactgctggatatattttaaatgttttatttgaagatcagttgacatttatttaaataatatttacattttaagaatttaaagttagattcagcctattttgggattacctgttttgggattacctattttgggattacgtgggtttttttgttgttgttgtttttgtttttttaacaaagtctgtaattgtgtttctattaaaaaaaaaagcagcagcagccatcagaaaatgtattgttaggccattttaatattctcaagagtatataagtgtaaatgcaccaaaacatgtggactacatttcccgctagttgtactgttttcacacattaacagaaatgctgtttggaaggggaataaaggagatatgtttgggatatatatgcagatttcaatcatcaaaagacccaagatattaagctgcctcctggaatcacccagaatttttgtctttccagtgatctctgtggccatggtgctgtgtgggcaaatttcctcttgctgacctggggctggttttatttcaaagttacagcctgattcctcagagcagcattaattaaactgcaaacaatgttgtgttggtataatagagttaagatgatttttcttccccaagcatgtggttgatactatggccagaaaagtttaaaagtaaattagtgacaaatactgcgtgattccatataaggtacttagagtagtcaaggtcatagacacagaaagtagaatagtgattgtcaggggctggagggagaggggtatggccagttagtgtttacagaatacagagtttcactttgggaagatgacaaagttctggagatggatggcataatagttgcacaacaatgtgaatgtacttagtgccactaaagtgtacgcttaaaaatggtcaaaatggtaaatttcatgctatatacattttcagctacaacaaaaatatgattcataaaaatattaattaacttctatgatgttttcatgtgtacatgtagaatgcatgtgtggtgtgcatacaaaataggctagaatggagagcatgtaggcttagtcaccgagacctgagctcaaagcctggttttgcaatttatgtttggagatcattgacaggctgtctcacgtatttcagtggcagctttcttatctgtgacaggaagaccaaatactcactgcaacttataataattaaataataataaatgtccagtgctcagcacatagaaggattaagtggaaacacagtatagatagttaataaactcgtagcttcatctacagtaacaagtagtcttggggaaaaataaaactagccacatcattaatttttcaaccattaaaccttgaaacaatcacgcatgtttctctaagaaataacataaaacaaatcatcctttcgtttaacaaatgtttatccagtgtttactctgtgccaagtcctggctgacaagaagcactgtgtaatggggcatgtgacagtgaccagtcaaataagacacagtgaggactgggagatcctgaggctgccactgccagatggacgtgaggctaaactggcccctttgtttgttttccaagtaggagctcttggataaatattttgtgtataaagtcaatggagaccacgcagtgtgaaagcctcctccaaaatcattattttcagacagttcatgcaggtgaaaataatgcagaggtcatagataacactgtaacagcttaattatgggaaattagagaggggcccatgatagagcacagcatttcctaaatgttccttgcctagaggaccctagttttctgaaatagtaatagttgtcccaccacaaaatgacccttttgtcaaacaactttgggaaacctgcattaggcaaaggtcagtgaattttctttactttgacatttctcagaagcattgatagtctgaaatgtgtttgcctaagagggagatatcgaagaccatctttcctgcagttatttgacagcagagccctttttccctcagagcgcttattaacatcctgtggaaaagtgatttttgggtcaccccactaggaacatgtgtcccttggagccacatgagacaagttgtaatggtcatttactggagaaattggctggattgtgctaacaaagggagaggaaaccaaataagaaaactgaccgtcctccgagggtcaggattttcttttgtttttttagctcaagggtccaatgttcccggggagcgtcaaagtgggttctttctgctatgacagcggaatacccatgaacactgggcgggagagggttggccaggagcacgccccggggaacctgtgtggtaagagacctccagtggggggcggtgatttcactcctagtgggctcagcccccaccagaagagcttcatttgacaaggaaaggcattaataatggaaatggattgaaggtaacactgacgtgcagatcaggaatagctcacacggtgatgctcttgcactagaagcagaaactatcctgggatctaaagaaatcacttaagaagaaaacatttcctcttcattgagcctcagtaaagctgcatgaggagaattctgcacaattgttcgtactctagcttagaaaatggagttgattaagtggaaggaaactttaaaaatgtgacaaagatgatgaggtgattaaggggtaggttttaagtagcaagatgtggggaatttaagatgtatgactagtagcggtgacagtgaggtttatgatagctgcctataaatacccaattaattgcctaatgtggcaaatgagaagaaacaggcttttaccaccaaaagggaaacttgaagtatattagggaaacagtatttaacagtaggggtgatttggctgccatgatacggagaaatcagttgtgttatttggataaagacttggaaaggtacttttcttcctgataacatcctggtgtcaacagattatttttctttaaaaaggatgcatacattttcatatttcttaggagcagagattgaaaaatagagaaaactatttaatttgctataattcaggttgcctgaagcctccaaacatgttttcccccaagctgaattatagtaatatctttgacggtaagaagcataaaacaactctctttttttttttttgagacggaatctcactctgttgcccaggctggagtgcagtgcactggcatgatctcagctcactgcaacctatccctcccaggttcaagttattctcctgcctcagcctcctgagtagctgggattacaggtgcccaccgtcatgcccagctaatttttgtatttttttttagtagagatggggtttcaccatgttggcgaggctggtcatgaactcctgacctcaggtgatcctcccacctctgcctcccaaagtgctgggattacaggcatgagccacccctcccagccagcataaaaaattttatgcattgtattatactgtatgtggagctacacctgatagtgtaagccacaataaggctagttgtagggcacacctgataacactcgctaacacttagtgagcctgaatatgaattaggtgctttatacaggagtatttaatcagcacatggactctcggggtgtggcattagaatcctcatttcacaggtgagcaaactgagcctcagataaattaaatagcccgaggaaggtcacataactagaaagtcacagagtcagaatttgcattcacttctgagttactcagaaatccatgcccttttattgcgatgctctactgcctcctgaaggcattttttgattatcacttttataaactttaggcttagtttatatgaagcactcctgagagtgaaatggttcgctcatgtttgagagtgggtggtcaccaggggtgttactcaggcttgacacagataatcctgtggcatggcttcagcaagcagcttgcccaaggttgcacagagaatgagattggccaggctagaaggaagggcggttggctccagctcaccgggcattcatatggtatatggaggagaactgccagatctcagaaacagcatccagatttgattataacttctctttgtggtctttgaagctttgtgttatttcttcccttcactcgtggagttaggatctattttcacataaacagaaacgattcctcctttctgagcacttcattgttggtggcattgtggaatgtcccaggaaggggggaatggggccaattagaaaggagaaattcttcttcggcttgcgtgtttatatgaaaatgccaaagccaccagctgttgcaacagcaggcctagggtaaagctcttccccaactgtcctgcagcatatatacagcagagggaggtcttttcaataggctcaattagaaagtggaaaacagaaagcacccccaccaaaaaaaagtgtggtcctgtgttcttgagttgcacagcaaactttggaaataagcacttaagtatactttttatttctgcaagaagttcccaaatatgagcatggaaatgacaactcaaattccaaccattccctgttaaatgccttacctcagctcaccactgaggagtttgttccttgagtagagagaatgtagattgaaaaaaattaatttcacatttctatttatgggacatttgagacaaacagcccatcagtgttactgttacctcattcaccttttttagccatcaggactgactgcttatgtcttttacattcatgggacacatttcaaatatgaggaattcagttccatagcaggatttaagcagagatgatatatatcatcttatttggctatctttataaggctttcttcttttcttcaaaaaaaatataaatggtatattagtactgatggaaaaaacagacctgacaggaaggttaaaaaaaaataagtgacttaaacaattattctggaatcaattcaagagagtagggtggagtagagtctgaaaccaaacaatataatcccaaagattatatttgttaaatgaagcttaattggggctgttttactgcattgaactggctaaggagttttccctgtcaaccttcctgatagaggtagttccaatcctatttcatccctctgctaccttctgtacaaggtgagctgtcaatttcttggagaggagtaagatcacagctgggactcacacacagttcttccaagcatgccacaggttggggctgcagtgttctttctgtggtgtggaggctcctctttctctagtattccaatcctagaggttctttgtgcttatggtatctcaagttataatcagaatggtatagtggggtttcataatctcctttgccagcttatagcagtagagtccctacattctcagaatgtgtaagtgacagcttatttcatatttggcattttagattcaatgagatttaacaatagtttttattagttaatttctcttcatttgtagtgaattacagataattttctttctgatccttttttctaaatctttagttgtgaaattttccagtaagacaaatacaaacaactgtcatgtaaatacatttggtcttaaatcagattagaactgtggactctccaaaccagaggttctcattccagttgaaataccaaggtattttctatggaattggattctcttcatttcaaaaaaagtaaactaaataaacaaaaaaaatggcttgaaaatgcttcttggtctctttacattcaaactccttcctggaatctgaagagcctgatacaaatgctttcagggacatgccattaaagaaaaaaaaaaaccctaaaaactgtgtttttctcctgaaataaaaaataaaaaataaaaaataacgaactattataaagtcatctactttaacgatttgggtattcatggagctgaaagaaaaatgagctatttagaaaaagaggtttctaaaccaatataaattgccaattatgttcttctttatcttttaagtttcctttgtccttatgtaaagggtttaggaggtaataataaagaccaagggaaggcccatacagggggaagaaactggaattcatgagttaaaaagaagtagaggagatactcatatttgagcagtttctgaagtagtctaaatctttcacccagtcaaccagggcgccttctctcagatgcagggaaaccctctgaccacaaggccccttcctgttcttttcttgaatatcaagcatcaccctctaagttttcagccatgtattttctttggactactcttttttacctttattaaatgcttcacatatatgaaaggaaatgtcaacattcaacctttcgtgtgaggtgggaaaaggcaaaagtttatttcggtgctctcctatttaaagacaacagaactctgttgtaatataattttttatacttgaattccaacataatatagttgaaaccatgaagccctcaaaagtgtagaaaaagtgatacatatcatctatatacaaatcctgttgtcagtcctggtataactaaattcaaccttaaatctttagttatttatctatttagagacagggtctcacactgttgtcccagctggagtgcagtggcgtgatctctgctcgctggaacctctgcctcccgggttcaagcaattctcccacctcagcctcctgagtagctgggattacagacacatgccaccacacccagctaattttgtatttttagtagagatgaggtttcaccatgttgaccaggctggtctcgaactcctgacctcaggtgatccacctgcctcggcctcccaaagtgctgggaaaatctttatttaatatatggatattcctgtcattttttctttgttcctgcaaatctaaattcctgcaaatcctgtcaatttagtatttttcctaatagaaattgtaaacttcaatatgttactaagaattaagctttgaagcaaataattttttcctgccatattctcttagggtatgtatagagaactgctggagtatttgaaaattaaccagtagtcagttgtagattttagcaaatacacatatttttcatataagcaatccaatcctatcctcctggcctatatatgcagtttgaggtggatatgtgttcacgtgacatattttgaaattccaagtcaaatactttaagtgttatacaaatgtaagttactggtattattactgtgtatgtgacatttaatttgcactatggggaatttaacaatattggatgaaagcgatagcctggatatagtagtaaaggcatgaaaactggtgcccacacttaaggaggccttatattgatgatgatgattacataacagcaatatctccacatctaacctaagaaatgtttagatatgtactgtctggattatttacttattacatgcttttgaaaatgttccagtgacttaagacttttgaatctatcttttgcaaaggaagagaaaagtctacttaaaccacaacactaaaaacaagttggcttacaggaattgaccccctgcattaaagaaaaacaaaaaacataggtggcgtcttcatagaatttttctcaaaagggtgtaatattaattcctgtaacttaaaaaagccatctgtatagagttttgtacccaaaatatatgcccatagaatgtaaatcacatgatataaaagaaaactatatggtattcctaagccctaacattcccaaacctatctgaatggggcatttttcaaaatgctattggtccaaagggtctctcatgggacccagatctgatatgaaaccacagaggagagtgacagggttagttgcctaattaggatggagcagcccatggatgtgagaacttggaactgggcaggccaactggtgtgggtcagagtggtggcagaggatggcctacctctgggcaatggaaagaatgctgacccatcaggtggggcacagtaactggtaaatatggtgtcagaagatttagcaagagatgaaaaggtgccctgataggcagtggacaaaacacacagagatcgtaggttcaagaaacatcacagaatcctagcaaataggtaagacagaggcttcaggtaaatccttctggatagcagggcctcagccacaaggccagtattcaaaagcagaattcaattcctgacatttaagaaagaaaaagccaagaacgagatggaatcattgattttcccatatcctggaaggacacagttaccagaatagttttaagggtggaactgagaccaagggaagaaggcagacttttcaaaacttgaacaaaaggtaggaattcatttcaggacacatttgagcaccatgactgcgtctgaagacatagtgaggactggccatgggtcatctgagcttggaccaagaatgccccatactccctcagggtcccaggctctgtagaaattggggaggagaattaaagggcagaaaaccaagcagcatattatccagataaggttttcagctcagtcttgggcttcttctcctccattcagcaggtaagattccatagtcaggggcctcaggctgcttcactacctatttcttagaactctgcacagctttagtggaagaggcagtggctgctcaaggagggttcacagcagcaatctgcaggaagcctcggctgcttcctgtgtccctggaaaagttcttgggagtttcctagagtcctcaatggcaccatggactcttgttctccataaaggatataagaatgatgtttcaactcgccttggccacttcgtgggaggcaccttttgaccaggaggcaaggtcacccaggaatctgttcagtgtgtttaatgccaacaacccctaaatgttttaaacagcaccgagacccactctatctttctatgaccatttctaggtagaattatgttcaacatgaccaatagcaaacgttgcttcataaaagaatacttgctgtgaagatcaggctggatgcttaaaaactgagccctataggccgttcattttctttcaaataatgttgtgtttgccatattgcaatccaaatgttttcgtatcatggttgatgcttggtgtcacatttataaaacacttaatttgtttatgccattcctttttcttgtaaatacctaaccagacctccaaacaccagtaccctgtattggaaggcaggtgcacacagaagtttgatggggaggcacatgtgagtgccacgttgttctttagggagagtgcagcctgcagggcgaggcagcttgaaatcgtgtcctgtgctgagtgtgtctattaggagaagtcttgactacagtggtgaatgtagagagggatattccttgagagggcagaactagggctaataattagatgttagagggaaaggattcaagctcaaggcatagacaagctttcttacatggggagcagtaaaaaaaaacaagggggagagtattgaccttcctggcaaggaatcgaacatagcagtaatagtagagttaaaagaagagagtggatgagcacttagcaggaattttatatttaagtgtagagtagggaattgacttaagtggcttttaaggtcagtgactgagttagaagcaaaattcaaatttctcatttcctaatccgggatttttacctgattccttgaggtggtggctgaacaatgccctctaaatatgtcatgtcttaatccctggaacttgtgaatgctatcatatatgacaaaaggaactttgcagatgcgattaattcaaggatgttaacttaattatccaggagggcctcgtgtaatcaccatcattttataagagggacacaggagtagtcagaatcagaggagaatatgatgtgataatggaagcagagagcagggtgataagctttgaagatggagaaaggggccacaggccaagaaatgcaggccatcactagaaactgaaaaaggcaaggaaatggattgtgccctagatcttccaaaaggactgtagttctgtcagggctttagctttagcctaatgaaacgcatttcaaacttctgacctccagagctctacagaaacaaatgcacgttgttttaagccaccaactttgtgacgatttgtaacaatggccacaggaaatgaatacacctgcctttctctaaactctatcttaaattttatttgatccctaaacaaggtagccaaggccccaaatgtacacaccaatgcaggaagcatagctgtctgacttctttccctcaacacttagttgttgattcttggattgagcctgtatattaactcactcatttcttataacattatttctcctttatttaaatatgcatttgatttttatgcatttctaattaaatcgaattttctttgcatgacctgctagccccttcatgattaagcttgatacttttccatctacttcctccctgaacccctgtcatgctgaacttgtcaagtttcttgaaaacaccatgctgttttgtctctgttattttgcatgtattgtttcctctgtggtgagtggcttttatattatgttttgcctagataacttctattctgctgcatcaggattatctttagctataacagaaacccccaaatagcacagattaaagagaggttaatcctctctcccatgatagtctggaggcgggcagttcagcgctggtatgacatctctgccctgggatgtcttcaggaaatcaggctccttttagctcattgctccaccttccctggaaggtggtccttgtctttgcagtacaagatggcatttcgagcttgggtcatcatatctatgttccagacagagggttagaggaaagcacaaagaggaaaaaggaacaaagagcataccccaactatttcgggagaaggttcctggaagctgtcaaattatacctatactcacatatattaacaagtacttagtcacctgcacaggggctgggaaatgtagtttttatcctggtgatgaagagtggcatcttccctactggaaaacagatgccctatttctatggaagaagagaagggatattaatggacaacaaaccatatctgtcacatcatcatttaactcagtttatataattcctgctctaggaagactttttcctaatccccaatgcactggtgtccctcctgtatgctccccacatcctgtgaataccttcactcactgtgtcaaatgcctttataaccttggagacaaattgctcactggactatgagcaatttgaggcaggagctctgtgatcactttatggcctagcacagtagctattaaaatgtatttatagtgaatgaatgaactaattaaccctgaaaaatttccagatgccaatgtctctaaaattttgaaatatgagcagataatttaatttcatgtatacaatattttatgcttttaaaagttttctagaaattcccaggaagttaagattgtatatccaaaagtataacaaatgtagctgtgtgtgtatgttttgtttcaaaagttataattctacacatagcaaaacatacttagatttcccccccaacactcacccacatctttctctataaatacagtttagaaaggtgtagtttaatctattaaaatgcagcagattgtgtgtggatcacaatctgtatcgatgtaaccaaattatatcagtaactataacactatagttatcaagtagactgatagtcaaattgaattataaagtctatcaagtaacacaatatacaatttattttctagcattttttttctaatgtgcccctttcctgtaatgtatcttaacaatgccatgaggttgtcagtgctggaaaggtaaatactgtggttcagagcaatccaggatcgtatagcactaagttcaagtgactgattttatccttgtaagattaattcaagattcgatgggggaataaaagtgtaattattattcatattatttttcaatatgtaggtcttccatttttcttacggatactattttgattgttaacagatatttatcatctactgaagaagtgaaataaatgagacttgaaaggaaatataattttaaaagacattctggctcttaaaaacatgtaatctaataggaaagagagattatattggaaattgtaatgtattacagtagctattcactgagactaactgaatgaatgagcacataaattggggaagttatttcttcagggtattcgatggaatacttttgtgaattactcctttatattttcccactgtcctctacctcaagaattgttagaggatagttaattagcatagtatttttcatcttgctccttaaaactagggtgaccatatgttccatttgcctagaactgtcttggtgtatgcctgttgtccaagcataattattaatagtgccccctcaagctccctgaaggagtaagccagcttgcagcctgctcctccatcctcagcaggatgaactttcccttcctcctcccttcttcttcactttccacaccaaaagtctgtaggagtaggggagagagtaacattctcattgaaagctcagtttctggctttggttcccatattcctgttaccacctgctgaatatcagcccatacgtaagtcttgcagattgtttcaagttcctgtggttacagataaaagcctttattctttggaggagaacatgcttctggttaaaaaaaaataaaaagacagagttccatgtttgagctcacaagcaattctttaaataactatgagattttccagcattcatcgtgatagacgctagatctccagagcatatccttatgtgccaattcttttgaaatatctatctatctatctatctatctatctatctatctatctatctatctatctatctatctggtgttatctatctgctatctatctatctatctatctatctatctatctatctatctatctatctatctatctctatcatttacttttgagacagggtctcactctgttgcccaggctggagtgcagcagtgcaatcatggctcactgcagccgcaacctccctgggctcaagggatcctcccacctcagcccccttagtatctgggactacaggtgtacaccaccacaaccagctgattttttcagtagaggcagagtttcaccatgtagcccaggctggtctcgaactcctgggctcaagcaatctgcccgccacggcctcccacagtgctgagattacaggtgtaagccactgcaccagcttgaaatattttgtattccatgaaattctttataaaattactttataaaacaacttcctcactttcttaactaatgtagattgaataaaatgaaaacttttgtttttataatcattatgaatattaattttttatagtaagtgattccttatggactacaggggcacatggaatcatttgacctttttattaataatttttgaattagtatctttctttttttgagatggagttttgctcttgtcacccaggctggagtgcaatggtgtgatctcggctcactgcaacttccacctcctgggttcaagcgattctcctgcctcagcctcccaagtagctgggattacaggcacctgccaccacgcccacgtaatttttgtatgtttagtagagaaggggtttcaccatgttggccaggctggtctcaaactccttaccttaggtgaccagcccaccttggcctcccaaaatgctgtgattacaggcgtgagccactgtgcccggccgtatctttttatatcatattattttgagtgtattgcctctattagtctgtctttctcacatacgatttgtttcctctaatctgctctaggctcaaaaacaacatcagcatagtgatgggaattgtgaataaaatcaatgtacatttgcttcaaatgatgagcagctctccgatgggaaaatctatgtgatttgatgacatcactttgcctgcagagatactttttttgcttgctttttgtctgagttccaagtagttgagtttgtagaatagttgacctctagataagtaaagtgtttttgtcattccgtttgaaaattagtgtggaaaattaaggtgtgcacccccatggagaaagttgaggtcaagcaattcattcccgaagctgtgcagtcataaagattcacatgccgagctcagaactagtattaaccaatcaaattgctcccagaggggtgctcacttcctaggttaactcttaaaacactccacatagccattttaggcttctaaatacttgttgaatggacagagaaacaggaaatcagagtggaaatggatgctataaatctattttctacagaaatgtgttatgagggcaaatacactacatcaaattttagaatctcacaatacttccgaattcaacccaaagctttcctttgttacatttttttctttccctaatttaagattcaccaagattgtgtaaagcttatgattatttccaagttttggaaatcagccttctttcccttttagaagagattgaatagccatccctctgaaagtcacagggaagataggaaattctattaaatagatttaatgtatctcatgaaagcccagaagttattcttgccaaaagaatgccttcagaagcagcaggcaaaatgaaaactgaaatatttgctgtaatttacataaatgctctcttttatgtaattactgcaaataagtataatgagataaatgtgtctgttgctttctctttagaatagatgttattaattaatcttgaaaagttcccagtgtcccatgaaattgatctataatgttctcattactcattgtggagatgggagattgctgattgtgttaatttttgctacattttgatttttagatgctcaagtagaatctgtaggccaaaaacactgtcttgccgaaatgcagttataatttcctaacagagttatttctgttgttgatacttgtctacagattataaagccttgcaaagacttacagattttgattatatgttggctttttccataagtttcatattttcaatttaccccaaatactgtaactgtgaaatataacgactaaggcattttggcaaataaaaaaaaaaaaaaacccacaaatttggtgtgaacatcaagaaataatgggtcttgagttttcatggccatgtgtactgtcccattagtaacatttagttggtaataaaaagataaaaaagttaaataaaattattcacatctttttaattgtgaaacaacagtgaccaaaaaaacctctaaatgagactgcaattcttgttattggaaaatatatgtatttcacagtagcaatctatacttatttttggaactgcttaccatgctatggaatttcaactgtggtgttattggggtttctacacagaagagatgccacataacaaatgcaaaagcttttatttgagagtcattcagagttgcttgaacatctctgaaggttttgaaagataaatgtgctttaccatctgtaaacactaatgtggcttacatcagaaggaggtggcctgaagggcccatgcacactaatgagctgtgcccaaaatgagtgtgatatcctttttccaattacgtaccctgacttacaagtaaatatattttccttctgctctcaaccactagcttatacatacacaaggtctttggcaggacatagagtcccagtttctctactggaaaggcaaatacctacaagcattctcagttaacaatgctaagaggtatatctgcaaactaataattaatatgcattgagtgctaactctgtcagataagatgcctaacatacactgttttagaaacattatttcatcttggcaggttgatactattttctgtgttttacagattagaaaattaaggttcaggtcaattaaagatgtggagctttgcttctccatgggagaaaatttggcctagttttagatggacataccttatgccttttagagcacaaacccaagatactaaactgtctctggatttaagtgtaaggtgagtggattatttctgcatcttatctccttccgtggaagtatatgtaagtcaatataggtgcaatctttgaaattcctattaagcagcagcaacataaaatcacgtcagcctagggtgtgagaaggaggagctccatataggttttgaacacagataaggctttcagaatggttctgcctctggaattgttactttagttcttttcctttttccaaagtttgtgttctaaagaatctattctgttaagacatattatctttcaatgtcagatgacctcctggccactcacctgagcccttccccattgtgcctgccacttttatacaccttggccaagttcctgctgagccatattgcagtttgcagtgaggtgcccagcggttgtccccatcctgccgctgtgaaagtcagccagggaatccacgtgtctgagaactaaaacaagtcaactccaaatcagctcttctatttctaaacccagaatctgctgttgattcacactggggcctttgaattagttttctctttcccacgctgcctcagtttctcaactatcaaaataggaaaaagaacacaaaagcacgtgtgttcagaagggagactccagccttatttagactgaaagactttttgagttttgtggggttttgttggtgtctttttttgtttgtattttaggacataaacccaaactgattacatcactatttgtattcattttaatggttgtttctctttgattgacatcaaatggtccttttgcatcatgagaaaaactctacttcttggatttgagttttcatattcttctggaagttccatagttattaattagttgctcttactttttctgaacctagaggctataagtttcatcaatgttactttctacgtattatttcagttttaaatgtcaacacctctatctcaaagagatatttgaagctgaatctctttgtgctctaggctcacaaatgcagtcctctaaatcactctcttgcacattaaaggtgtgagctaaagctggctggtacctagcattctggctcttttccctcccatgccagtgacagacattgctcatcaatcccaggctctttcctaccaagcttagagtgcacttggctttggagaacccttcctgggacagggctctaccagtcatttggagtcagcaagtaggatgaaatccatttgccatctatagaacaatgccccatgtagtaaatatcaagccaaaggttggtttttctcctcaggaagctgtttgaaacattaatgcagtagagcggtgaagcatgagaagatgctgacaatcttagaagctctattatggtgtaacggggatctcctctatgaagttttgaactcaaaatcctactaccaggggtagagatgagagagaattttcttctcttctctagagagcctcttatctatcttcatagatagtggttgttcagattcatgttaaccaaacactaatgaaatgcatattcttcttcctagacccagatattagtttctaggttttgatcctacttgcttttttttctacttaacttgaatggaaagccacatgatggaggtatgcatcagactgggcactcttaccttttccatgggcatcgggatcaactagtggagaggccatgagtttctattgtagtagggtaaaaagacatcagagccacattctgatgtgaatggccacattcctatttatgtttccatggtgggtttttttttttaaaatcagttcacttttttgggtcatcttttaatctgaatgttgttagtattaaatttcagtgatacttcataatgattttggaagaagaatgtccaaattgcttgaagtactcacatgaaccaggagctacactaggagccagcctcttctgggagtcctggcattgctgtgggtctggggaaagctgggtctgcttgggactgggcagcgccatggttggactaccccagaagatctttaatctttcctttgggggccttttttttcttctcaaggcattcttggttaccagaaacagacatgtacttaagttgcctcctgtgaaggaggattgattgaaagtttgtgcctgggagaagccaaacgaccagctgcagcaagggcaggggctgcactgtaccaccctcacatccttgtttgaatcacagttcctctgcctgactcttccctttctttcccagctggcttcctctgtgtattcatagtcactcccctcctcagcatatgcttagcctagcccacagcggccaccccagcaacgcctcccaccacctttccactctagtggcccctgctgtctagctcagcgacttagtttgccagttctcaattccacagagaggactgggacacagcatctctgatcatagtgtcacatggactgaaagccagtggttaaccacttttgagtcaagaccctattgttttactcagctgtggccagaggttgtagaattgtactttataaatcatagctgccttctacagactctagtatacctgtgcttttagcacccttggggtgtgagaatataatgatgatggctagattagaatcgtgacaatctacttgatttacctggggaatatcataacagtgcggtagccatttccaaagctagcttcagagagctcacaataggattaaagttatgtttagaaattaaatatgatatttagctcatttaaaatttacatttgtctacccatttatttttttcctggcagaagtaaaattatttcagaagcactcattttttctgtaattgttgtcattgggttatttcataatttaattatctaagaatgccccacgtcacccagtggtgaggtgaggctacaaagaaaggaaccctggcatcctgccctgcactcataagtgatcagaaaataatcaaagtggatcacaggcctggaggccaaggaagctggtttgatatgagtgatctgcttggcgtaaaacttacacctttcttaccctgaccgtcccacttaatgttacttgggattagacctgagacccttggagtataatttttgtgtagaaacatatttctgtggtaggtgagatgaagctgagagtcttttgggtaaggagattttccaccccattattttctgtatggcttttaccaagtacaaatcaaaccaatattagagtccatttctccagccctttggctccctttcagccacctcaggaatgttagcatggacattgaccacaacaccccagccttttgtagaggatgcaggtagtgttctgagcagagaccctggggaaacagatcaggcagaatggctcaggagtctggggtctgatgttctacactgggtggtgctggttctgtctccgttgatgtctttgccccagaaaaattcacccaacttcttttcaggtctcagtttcctcatctgcaaaatgggaatcaactcccctcaatgacctctaaggaccattaaggagctgcttattaatgatgctaagaatgcttgggacttataaatatttcctaagcagagctgatatctttcctcttgctataagattggaggaggtatgcagcatctctctgttcatctgtaatttagtcagcttgtgtacatactgcattgcattaaacgctgaactctgatcctagtgtttaaacatattaaatacaaaatatgagtagtataaattgtatgaaacacttttgtctcctacttggaggcttaacaagattttgatgcggggtcagcacaaacattatacagacactgctaagagtaagtggacgtcttgtagacagtggttggaaaatagtcttacagcaaaagtagtcgaagcccatcactgggggatttataagtaggccaagggaaattgagggtgggcaaggatttgaggtatttgtttattttatttgaccattaacttttgtgatactatttctctaaagagcagaagagagcttcacagataacagacttcaagttttaaactcttcattcccacaatagctttgctggggtttgctgccataattaatcaaaaggaatgtcacctatgtctccctttagaaaaataaagcttcaggacaaggcagttttctattagtggcttggggatagacgacaccaccacatgtcttttatttctgagatctggcttctgggtgttcattaataaacacacaaagggttttacctgatggctctgtaaggtacagtgctgtcggcaaactgtgtggaagccattgacgatcatcatactctcctgttgtttaattgaaactctaatggttttatttacctaagcattctttaaattatggagttttctttcttcctctttctagaagtggtcatctgttgccctcctttgcttttgtcttcggctggtgatttgtagcctctgcatccctacaagtgtagttctctaaagccactctggatgggaatcaggtgctgggtgaaggtttgtgtcctaaaagaaatgtggagctctttaactatttcctttttataatcgtgctgttttctgtttttgccctgacttgtgtttttaaattttgctataataccctgaggtctttaatattttcctctggggcaaagtccaagaggaaaataaactctctaaagagtgatagaaattgttgacaagggaagtttgcaaatgaccatgttttatttcagttttcaaaaactgtaagcagacatacagaaatcccagcagttacccatatctgctgatccctctgtcctctgagaagaaggaagagatttatggaatccacaggggctagggccacataacccagtttgagcttagaaggcactagctccttaatgccaagtaaattttggaaatgattctcctttgctgacagtaccctcattactgattgtgtagagtaatttatcaggcatttcttaaaataaaccgttcatttatactaataggacttggcaggaagaaaaaattggcaggacttggagttcctagtgtgggttttttttttctttttctttcttcttcttcttctttttttttttttttaattttgttgcctttaacaaatttaaaaacaccagcattgaaaacttttaaatattttgaggaaacagttttcagaggccagcttgaagttcattaaggcataaagaatggcattataaatctgcaaaatggaagacaggaaatatttccaatgacaaagtttaccaaaagaaaaattaagtacaatgcatctgattttatctttcttcattcttcaggtattgggttcctcatgtggttaactttacctatttttgatgtcacatgggcttttgaagaatgctcattttcctttttcttctccatgtacagttacaatctccttctccttggagtctgtatcagctcgctgcttctccttagttatgcacgtaatgtatcagtgttgtttatgtatacccaagatagttattctcaaggctttcttattatctctgtattcttagccttgggcctctgacaataaatttccatcttacattcccttggaattaaaaggacatcaccaggattgataagcttttctcctgaataaaatgatagcgatggaaatcataataaaagataagtaacaatcgaatctgcagtctcaggaaaactgcattagccctctgccagcactgggaatgcggctggcctgagagccaaactcacaaaatgctgcagtgcagggaagatacacacacacatacacacacacacacttgtaaccacacacccctgtatattagatatatttttataataatgaagctatataagttacagcatgtgttgagattcagacttgctagtaggttgtgtagttcagaccaaaacagaaagaataaatgttttctgagaatgaatagagtttttaaaaagttcaggggtctactgatggttgagtcacactcaaaaggggtaacatgggctaagtgaaacttacaggaaaaaattggcaagtgttttcttatcactgaattagcagactctaccagcttctcaggcaacttctttaactgactttttaacatcaaatggttatccctgttttcatcttctttcctatctggaccttagagcttgttattcgtctaaaattcaactgttagattgttttgtaatattcaagcttttgcataattgatagtatgagacgtaagcctccccctaccaaaaaaaaagtctagaaggaaatatatcaaaatgttaaagacaatgttattatattaataataattcttcctgggtgataagattttgggtaatttttatcttctttatctttcttcagtatttttaaataatttactctaatatttagaaaaatctttacagaacaatgggaaaaaggcataaaccttatttttttagaagtacagtgttaattaatagaatatttttttctagaaagttaaaattgtgtccattatttctttctccatgtgcattgagaattaatgctctacacagtcatattatattctgtttatccttattattacatatctataatttttaaatatccctgaccaattcatcagtaacttttaattttctagttttcttacacttttcttgccaatataagtagttttcctttgttttctttcttttcatttttcaggctgtctattaatacaagcatatgccagtttatttctattattatctgtggtctatgatataaggaagttaggtagtaaacacttgggctttgtaagtttcttctgctcctaaccaaagatttctagcaaaatcattagcagaagtgttcttctagccaccacatttaggtcattgtctttaatttcagaccaaaagattgtctagaaaagtttgagggcagtgtgtatttggattggcacatgcatcctttgagcctaaatataagaagagaatccagagaaatatcatcattcctgtcaaggaaaaaagtggtgtgagggggcctcattccttaccccttttcagattgaattcatctcatgaaattgccatgttcttgtttagcaaaaacaacaggagcatagaggaacacggttatttcaataataaagattctttttatcacagtatcttgggatgtccaatagattctagtcttttcactatggtcctttaacccttctaaccactggttgccttttgctgagttactatgattttctgcaaaggggactcagttaacaggaatcagtgagagaaaaacttccatgtgactctgcctctgtgggtgctgtggttatgatctggtgggaagatattggagtccagttgattctgtgctgaggaaggctgactttgagcataagcttcttcctggcgtcagtcactagtgagacacccagccagaaatgcaatgaaatctgtgtcttttgtgacaaactctgggtagtcacaacatccaaaagcttgccctgtggagaccaactgatgccagccagaggacatcggactactttttcctcttgctaggaattattttagtcctggagctaagagggtggccacctctttttcagggaatcccatacagaatgagatagaactttcaggccccacaggcaaattagctttgacaggttcagaaagcttttcttaattagtttgcctatgtgtgtagcattcttatttcccctttcttctcgtttaatatttagtaaaagaaactcttctgaaaatttcaaccaatttcagtgaaaactagtaagtaaaactaattttgttcctgtttattttagagcactaacaggagtggtggtaagaggcccataggagaaggcataagagtcagaggggagaaggagaaaaggtaggcaaagcccaggtggagagcctgggggttggttcagacacccctttccagccactgatttgctgtccaatgctaaattctgaagatccctatgttttattaaaggaaatagtcccattgatgaattactgagaaaatataccaatgtagatgtgcttacaacttcatgcaggtttatttaggctgggatcctagatttgctctcacctctaaactttagacatttctcagttatttgacctgaattactatggtttactcttccagtaggttgcaggccttgatgaaattggtttataccctttaaactcactcataaaactaatttccaccaaaaagccagttgaattctgacctcctaaagggcaatggtgtctctatcgttttagattcttcagtgctaagcatgagtgtatgactcaatcaatgacttgttgaattagtgtctattaaatttttttgtgggaaaagccttttacagcttctggatctttctatccctgagtatgataccttcttcttagtctaataagaacctaatgtggcacattgatactcacaagatggtttgagcatggcttccgggcaaagagaagcaggtagtttggagccattttgtgtgtgttgggggtgaggggggtagtgagtttcatagctttatcaaaacttagttctgctccactcatcagcatgcttttaccatcatctgaaacttaagctcctatgatggtgtctcccttggacagggctaagagcattcttttcattctcattttcagtgtttcaagtgggccactcagaactgcttaggtcatcctcttctcatagcgacttataacacttttatgtcattaaaattctacattactggggattacattctgaggacaagattcacttgcttgtgggaggaactcttgtagactaatcccttattaatacacgtgaattcttgacctcttgggccagagaatgtcccctttgatccctttccagttcatcttttctgtagcagggactggggaagaaataactttaaaacaattatgagtacaatgctaaaattaccctaacatgccttgagaatgttaaacaatgttatttgacatgattatagtagatgcaggtactacctggactgtggagaactggaaagagaaaatactgaaaaaagagttagaatctggcttttgtccttatatgttttgttacctgtagcaagtcacttaatcatgctgagcctccatgtcttcactttgaaataagtaactttacctactgtctaaaattaataatattaacatatacatctataggagcccataaatgcaaggtaatattgcatgtgattgatggacagcaaaaatatttttgaagaaaccccttaacaggggacatttaccttctaagcagcctcaataattagttttacctggtcaaaactgtcacagcctctgccaccatcatttcctcctacacccctccaacatttatacatttcatattttttacataaattttatcaatggaaaacagcctctcaaagtgaactaaaatatacacaaaattgatatcaaccatttcttctattagggagaataagctgctggattgtccactcctggagaagatggctgttctcagattaacttgatctgcctacctgtatttttactaattctttagggataagaaccaggactaaattagctcagtgaaatgaattttgacaatgtggcagtcttcaatcttcagtaacccaatccttacagtatcttcaaagataagtatgtctcataagtcctattaaagaaagcttagtcccagttggagaatatacatttgatactgagatttctttggaccaaattagtaaccaggaacttaaggtaaatccaggaaaagcctccaaggcttggtcacaatcactgggaaatatgaatacatctataagcactttttttctttttctgggggcagcaagacacagtggctcacagctggcattcttgcccctcactttttcttttatttgcagcacacggttccattttcaatgtagcatataaagaaaaaaagttaaggtattaaaaatgcatgtaacgtcttctaaattggtgggtttcagagtgaagaattgtaattgtattacagttaggcaaaatcattaattaggcttctgtttgtaatttggtttaaagaaaaataattttagggccaggtatggtagctcatgccagtaatcccagcactttggaaggccaaagtgggaggatcacttgagcccagcagttcaagaccggcctgggcaacatagtgagaccttgtcaccaaaaaacaaaaaattaaaaaaatttaattagctaatggtggtaatgcatgtctgcagtcctagctactcaggaaattgaggcaagaggattgcttgaacccagggatctgaggctgcagtgagctatgattgccctactgcactttagcctgggcaaccgaaggagaccctatctccaaataagaagaaaaaagaaagaaaaaatcttagcttgcataatgccttgaattttcctatggaaggtcagtaagtgaaatattgatgaaggcttgtgaaatttgagcatatgatttcagacatgtgtgttgacaataatacactgataccacagttcaagaagaaaatgattcaggaggtaatagaagaataaagatggccactattaactaatttgctaatgattattttctataagatatgtgttataggatgttcttagtgtcatatattcaatgtaacacttttgattagcaggaattacttattatctcagctgtgaggttggccttaccatagttacttggcttaaactggcaatcacgtctgatttcaattatgttaatgtaaggtaaagatattcatagactagaaattaagagtatactagcagaaacaattccaaatattcttgctaattatattgttgcatattattcaaataagtaaagagccatattaagcaattatctgtggaaataaccaaaagaaaaatataattaatttctataataaatgaaaaataagctgaggtaagtatacaggagtggtattcaaaataccttaacaataattaatcataccccctcactaaaaataatagaatgctggccaaggcattggaatggtgtcactgaggctgcatcctgaattggatgttagccttaatgttttggatcattaagaatttcagtgggatcccaggttgggcacaggtgatgcaggacagcagttatttactaattaatatgaaatagatcagattctagtaaccagtatgaatgtaccagtgcacacaagcttaatgtcagccctggtgaaaacctaataattcattagtaactgtttgattcattttttattaaatttcacaaatgcagtctgtcttgactctcagtcctccgctgtcagaattgaattgtaagtcctgggcagatatgaaagaagagaatactcattacaatattgtatgcaaatcctaaggaggtatctgagagtttcatttctaataaggaagaccagtgtgtagcacactaacccttccagcaagaacagtaagaaaaactggataagttttcaaaaatctgttcaaaatcaccagggaactaccaagagagttagggcttcagggccaatatcccaaagagaaaggaaacacactggagtaagccctgtgtactctttccctttccccacttagggcattaccatttcttggtgcatggcataatgacctactagaaatggtgacttaaagctcgcaccagttttgctgggtctgggtttagggacactaaagcagtcagcacatacggggccaagatctcagagaaaagtaagatctcagagaaaagtagatattggagataaatgtaagactgaaagacagagagaagaaggcaaaccagctagcaatcttgggatctaaggatcaacatgacaataagattctgggatttctttttgcttcacatatttcaagctaggtattggagaaactggtaaccaagaaattttgaccaaaaaaaaaaaaaaaaaaaaaaaagcctcaagaaatgcctgctctctctagccaaagaaccaggaaaggggcaggctagcatgatagaaaatgtttagacagtaacctccctacttcagcgaaacaccacaggaaaaaacggcagccccacttccacctctgtcagcaaaggcaaagtgagaagcctagacttacatttctacctggcagtaatgatgcccatccccgcatcaaaagtggagacccatggggagaaggcacttcctcccctgcccggtggtaacaggcatgcctccccttctttgctggcgaggtgttagagaccaggggggaaagcctggactgttatcttccagcagtaataagccactcactctaccacctgctgtatccatgaaagccacatgggtaggagcaagaaggtccctgataccaccagagacccagggggaccctgaagttccacccctgcccagtagtattgaggagtcattctccctgcagcagggtatcgtggagaccaaatgggggcctgggcttccacctgcagcttgccataatgaggcaggaccccttccccggccagcatgcagtcaaaggaggcttcctaagacagaagattgaaatgagatccagagtctcataacactcaaaatgtccaggaatacaattgtaaatcagtcttcatatcaagaaaatctcagcttgaatgggagaagaaaaatcaatggatgccaacgatgagactgcacagacgttggaattacctggcaaaagttttaaggcagccatcatataaaagcttcaaaagcagttacaaacacacataaaacaaaggtgaaagtaggaagttttaacaagaaaatagaacatctctgcaaagaaacagaagatataaagaaggaccaaatggaaatgatagaacatgttgagcctataaagttactgttctcttcagatggatctctgtgtgggttggggtctgcattcaaagtccagacatttctcaagtctgtctcagcctttgctttccacatgaccctgtcatggctcctactcatggtagttcaggcaggcctgctacagcctcccctgggcaatgagggaacatgaatctactgcatcctcctggccagagatttcagtccagggctaggcacataaccaagtacagaacctgagaaaattcttggattctatctgtaattattgggaaaactatctctttttcagtttgtcacttaattgtttgaataattattagaattattagagcacaggctcctggctgccatatttgtcactactcagttggagcctgcttcaagtgagccaggagacagggattaagacatgatcagtattaggatcctggtgacagggtttcatcactgggatccatctaggctttcttgagttaagcttttctttttaaaatattattttattttattgtaagaaaacttaccgtgagatttactctctcaaatttttgagtgtacaatacagtgttgttaactatagaacaatattgtacagcacatctctagaaagttttcatcttgcataattgaaactttatgcccattgattagcaatttcccattcccctccctcttaggtcctggtaaccaccattctactctctgattttgtgaatttgactattttagatacctcaagtaagtgaaatcaggcagtctttatcctgtgactggtttatttcacttagtataatgtcttaaaggttcatccatatggcatggattttcccatccatcaaaatagcaggtggtaggatgatcttcttttttaaggtcaataatattccattgtatatatatacattttattaatccattcatctattgatggacatttagtttgtttcttagttactatgcatagtgctgcagtgaacattggggtgctaatgtcttttgagatcttgatttcagttcttttggataaatacccaggagtgggatagctggattttgaattgggctcttgagagagaaaaagccttatgaaagagtcccaagaaatagagtcctaaagagtaaaagcctactttatattattctttggattaaaatgtagacttttattgtgtaccttttgtttataaagcactgcattaggttttgtactcatcagttcatctactcctcctaaaacccagtgtggtgagtgtgatttccacagttaacaaatgtgtggagggggagtctcagaagggttagaaaatgtgtccaagtcaccttgactagtaatgccccaggaaaaattcaaggccagaagtggctgctcccaaaagctgccttcaaaataagatttatctgtaaatatttgaggaagataagaatgtgttacaaataataacttctatatcaatgaattttcactgctatagtaaaacttcgacatggtttggctgtgtcaccacccaaatctcattttgaattaatcgtagttcccataatccccatgtgtcatgggagggacccagtgggaggtaattgaatcatgggggcagttacccccagctactgttctcatgctagtgagtgagttctcaccagatctgaatgttttataaggggctttcccccattttgcttggcacttctccttgctgctgccatgtgaagaaggacatgtttgcctccccttccaccatgattataagtttcctgaggcctcccaagccctgtggaactgtgactcaattaaacttttttccttattaaattatccagtctcgaatatttcttcatagcagtgtgagaatggactaatatagctttgagtgtattctaagtacttagtgagccatgatacagaggagagatttcttaaaatgtcttttctctgaaggcctaactcagatcaaagaaataattccaacagataatagaataaataacagtatggactacagaaattatttgcagacaaataacattaatttaaatgcaatcttgaaataattcaaaaatattaagtcatcacgtttacttatatgcacataatttaaattctgataaccttgagaaaataaacatttgagatattatcaatgattttttagaaactctaacttatcaagtgatgaataaatatttgagtgttatctgttttagtaatgtactctgtctgtagacactgactggtgtgcattttcatctgtaagcaatgaactaaattacttttttgatgcagtccttttattttctagtcaaagaatattgcaaatgattgaaaggatttataaaatgaggtggctgagatttgttcttatttgcttgcagctgaaagcataatacacttaatacttccaggatatggaggagctaacagatgtcaaaagagcagagagagctattttgcaaagattgttcaaaaagcaaacaaaaatcctttcttttacaaaattcataaactttctctatcagacattaattatctttgacagaaaaagcatttgctgtttatatagaatgtatcttttcccttttcaattaaaaaaattaaagttgttatgataaaggtaagaccactggattaaaattagtgtaacacaaatttgtcttcatcagatttcaaaagaaccattactgtaagctctatctttgtagcactttactgtcaatgcaatagagacaaataattttgcttaaagatagcaacaaaataatttaaaatcaaagaatgttttcagttgccattttgcctaaacagttttctaactgatttgcatttccaggaactgctaacgctagatattttattcagcaaattcagaggctgtggatgtattctagtgatcagaggtctgtaggcctacctaggtaggtcaacttggtatgcttgaaagaataaccataatgttgcacattagaattttaggagaaagatgatagtttgaggaacaaattgcttaatgctgtttccataggtcccatgtaaacaaatagtcgaatgctggcaagtttttacaatcaaggccaatgtttaataaagacaggaaggagtaaaaaatggaaatattatttctggatttacattttgtcttatttcagtccaaattcctaatgctgaaataatccaaaaatgtactgaagctgtcacctgggctgccaccatgctcttataaacatgttacttaagtgaattggtttgtttgtgacacaagctccctttggaattaatcaggaatactacaaatacagtaactatttggccttacacatcttatttccctcttttgttggtctagcccctctttcttctggggtaactcctcccacacacatggagatcatgagcaaagattttaatcctgtcctctggccacacatgatttgtcaagggttggcctaagatgagtaaatatgaagcattgccacagaaaatttgcagttataatggaagaaacaattttttatgctctgatgggcaaagctgcattgatttaataaaaacaaagtcacattaaatctatatatctgtcttaagacatttctggactttagaaatatgaacatgcgcctgtgtcgtagaacaggaaggaagagtgtatatttttaaagtattactctaaagcagggtacagcagttaattaaggagttttatgggagcagtgtcatctgtgcacatcccaatcttgttcacatactcagagttccattatcaagaggatactaaggtagattacattgctcacagggttattgtcaaaagccctacattttctggtcttgtgttaaaaaccattcctttgatgagaaggatatttcaagggatctccaatttgtcttactcccttgttctgattccgtattgaccagcaacctattaattgccatgaagaaaatatgctgatgaaatatgctggacttgtagctatctggtccatgtgacaatggtttctgatgcaaacaaagtctcttcttgaaataatgcttccatgtagttgactgtaggtggagaatgggccaatcatgggaacacgaatagcagtgcttcatgtgacagcagtatacattaaggagtggtaatttggtacccatattagttttaaagacagtttgattttgagtatgtcagctttcatgggactgagaactaataagaatcaggtactgggcctttggagcacaaggttagatctagttggagttcccttagacaagttgttcccaaatttttccatgtatcagaattgcttaggaaggcttttaaaagtacaaattcctgtgctggagattctattcagtagatcaggcacagtccagctatttgtattatttaagaacactccttagatagttctaatgcatatccatatttaggacgcattgtcttagactatctccatacaacattcatatatgccttgttttagctgatttttaaagccataattagatttcatgagttactggatttgcctgcattatacttataaatttgattctagatggaatttctggttgattttctaaggcacacatctctgggtttgcagaagaggtggaatggaggggtggcaacaaaaattggaatttgcgtctttgatgtggtaaatagtcagccaagctcactactcctgtccctagagactgcacttcagaaatgatgagtgattactcttaattttaatgacattctttctctagttagtcatttcattggtcagcttctgatactttttactttgttttcatagttataggatattatacaagactatttgcattgactagtaacatctatgcttgtggctgcattcttgctgttgagaagtcagcgttctaactgttgttacttcataggtaatcttttctctttctccttcgacttttaaatttaaatttttgtcttggactttattttttgctgttattgtttacttgttagttttgtttttgcagttttactaaaaatgtaagatgtatctaggtatggatttatttatatttttattatcttgtttataatttgtttgactttttgaatctgagaagtcatgtctgtcaacagttctggaagattcttcaaatgttgatagtctcttttctccttctagaactccagttagctgtatgttaaccctgattactttatctttcatgtcttttaactttcatatttttaaagtctgattattatcttcagttctgtttggcagttcacttaatgtctcttcagctgtatctaatctgctgtttgcagtttgctaaatgtctcttcatctgtatctatactgtttaacctttccattgagtttttaaattaatgatttacttatttctaaaagttatgttttcacatgttattcttatagagtgattttttttcttataactttgattcttcctttttaaaacgtttatatgttggatttgataatctaatagctgaactatttaaggatctgattctttcatttatttgttttgctttctctagttcatggtaatttatttccaggtatgtttaatatgttttgttccttggaactttacctgtcagaattctttgaggtccagctcaagagcatattccttcgtgtttgtttctgatagacacctatgatacttcaaactaacaacttttttagctacatttcaccttataatgtttgttactctcaaagtggtgtgaattcaggctataaatctgtatgaggtctgacttatggttaaattctcaaggaaattattttatcaccctccatgctgtgtcagggttcttgccattgttccatgagatgtattttatttatagttcaccatttcactgaggttataacattttgggaagcccagctttatggagggatcacaaatatgactcctcatcttgtacaacccttaagctaggttttctgttcttcctgtggtcatttataccacagctataagtcagaaagtattgacagatgctcctggggaagctgctagcttcggaactcatttaatattttaccatttgctgtgtgtactggatcctccccactctcctcctgccttccggaaagattttttatttattttttatcaatgtagccatacatttaaaatattttaaatctgtatcctaacatttttttaatgtcctgcgtcgagaagatattttcaggatagttagtccaccatatttccataaatagaagttttgtgttctttttaaaacttaagaaaaacaacttcattcttcaatttttatttcatgccacagacattttgagcaatcagataatacaagaatttatgggaattttaataaacatctttttcaatatgctaatatatttctggtgagtaaatatacacctggaatagcgcttcccaaagtaaatgttccatagaacactaattgtagttacatgataaaataagcttgggaaacactgggttaagcaaacttacagatttccttcttgaataaattgcatgatgtataatacaccagtgggctcaagcatctttgagagtaggataacttatacccctgtcttcccagaggtgcactgaaagaaagctggcttagacataaaatgacttccccaaagccatagaggtagttagcagagagccaagacaagaacccagttctcctcacactccctttctctttattaccacaatgaaacattttgtaaatagctacttgcaaaactatttccagtaggaccccatcctcaaattgaaatgtgtttaaagcccatcttctttcaccaaataaatgaaagttggcttctctcctaaaaacagctaaataggaatgttccagaagttcttcaaaataaaatcttcacgaaaaagaacttctagaagttcttcaagaaaaataaaatcttaagtagaaaagcaggggttccatatcttgaactgaagtcaaaaattgatgcttttgtggggcttcaatccgcatcgacacagagatataataatcctgtctgattgttaagagggcttgtattctcttgaaaatcatagtttctagttggcaaggagcaaactcccaagaacaagttgtgacagaaaactaaaaaaaaactacttttggatttcaaccagcagaatgtgcatagtttctgactgttagtgtattcttccccctattacggaaaatggactatgggaacttgggaaggtgaagtgcaatgttatttacatttttgtgccaaaacattatgaagtgaaatggtcaaacatgctgagagaatgcagcatatgaaaattaataggaacattttgaatatgtgatcttttacttgaaataatataaatgaaaagggttctgtggaggtactttcttgacctcttttaaatgtttctttttctttctttctttttaaacactctcaattgtttataataacccatttggatcctagacctcaaagttctttcctttcagaatttccttttctctgtttgtctgtgtacaacaaatacctttcaggaaaaaaaaaccacacagtgtgttgagcccactaaatagtcagtaaaagatgtctaatagcatctagaagtaggaaacgagatgagtattgggttggggatctgagtgttggtgtcccatttagtcatcaatccatgaaaacaagtgattatatgcaaaggtattcaaaagggatgagaacactgatatggtaaggagagaacttctgactgaaagctagagagtgacctggacatttctgagaagatgcttgggaggatggcaacttggtagacttcatactaacaagaagcatattagagaattaacgatgatgaggaaaaggagaaggaagagaagaaggaggaatattgagcttttattctctgttaggtaccaggttaagcactggccatatatgattgtattatcacatcgggaccccgaaagctaggaggcagcttccatcatcattcctgttttataagtgaggcttagagaactaaagtaacttgtttgagattttatatcatacatagcagaccagagatttgaacccaactttttctgatatcacaccctggtcttcatcactaagctatattgccttctatatcaggtgtggctacaggttgcatctttttatgtcttagatattgtggagaaaatatttgactttatgctgttaatctagaccagtgaaagtttggagccaactgatagctccagaaatttggccctgaggcagtgcccaaaagagtggatgacagttagtgaaggtcagcccgagatgagacaaggcaggtccctgaggagaagccaggcacaatctgaaagctgaatgtccaaagagcaaggcagggtaaggccagggttgactgggatatgaacaaagtataaagtgggtcagggcaattctgacaaaggattttctagtgctcatgaccaagtttcctcagtctacagcatgcattgcatactgaggggctcagtaagtcttgggataaatttttatttgttcaataggatagagaaaagatgagatgatgcagagtttctttccaggaatattaaactgaccttcaatatcagtatttaacttaaagtacccagcatttcatagttatagcaatagctccaagttgaaatacctgccttattttctcacaaaaactgcatattgggatgtccttataaaactgttttttttaatttggaaaatatgatcactctataagtcatttcaatttcttaactcaagacctccgaaactacactgtttttctatattctgaagtccgttccttctcttgtattcactgtctggattatcggtcacatcagtccccgtagttggaaatgacagtcatcctaggctgcttctgctcttattccccacatccatctggtcaacagaactctcagttccatgtcatatatctcttagatttatcccttcctctccattcctacattttctatcccatgtaccttacaggccaatgggctttctcatgtccaacctttggaccagccactgattctcagcccactttattgttatcaaacttacagggtcacctgatgaaaagcatgaaccccccccaaataaatggtgggctgctttgcttagaagagctgatgcaagttgtaggtacttttaggatttagtgcttcacagtattaggtacatactctgtatgccctttgcttataggtcagaattcaaattctatagactggaatacaaggacttctttcccaggaccccattcaccttccctgcttgtcttgccctatggccaactcatgctgtattgattagccactcagatatattggcagctttatacagttgcatgacctatgttatttcctgtgcttcaaacgtgcatccccttatataatgcccaccaggagatctccaatccctcctttagaattcaagattcagcaactctgattgaatcctcagccacacacagattctccaaccttccttactcttctgcatatgtatatttcctagcatttatcaaactgtattatagtaataatttgatattatgtcttttcccttcccagtgatcttcttgactgtaggctcatatttatcttttatcctcagccccttgcaaaaacttggttcaataaatgtacttgttgaataaatgattgtgctaagattgattaattatgacaaaagaataactctggctcttttgatacaaattctgttggttctatggtgcactcctttttgtgagatcctttgagaactgtatagaatactttttaaaagggaaaatatgtgttttgaattgctgaggtagaacatcaatatattgagaaatttttataagaatttttttgttgacagcagtgaaagaaaaagtcagaagctttagtcaaaataagtgaattttaactcatgttagccaataatacatcctggtgctagtgagtaatatttcaaaacacattggtgtcttgggtttaaataaatcttgttttctttattgccataaggttcaaataccaccacttattttgtctgtttcctttatgctttgcgcatgctacttaactttctgagcattataatccctactgtaagtgcaggaagtgatatatttacctctcagaactatcataaggatccaaggaagcaaaatacctaagttactaaaataatagctgacttagcacttaacagtacatttttttctttcttttttatatttttaaaaatcatttttgttagatggactgtaccccaaagtgttaggttcacaaatgcattataacttgtcatttctcattacaagctaaactaccccagtgccattgcaaatccctgcggatttttgctttaggaagattgctgtagacttaacgggtgaatcactttgctccgctggatggtagcccacagcccccttgagcaaaggaactcttatgagacaggatggactctgggcccaaacacatttccagtcagatcaagaatgccccaaaagggcaccagagctacctcttccatgaagagatcctggagctgatgcctcctttttgtgcaccaagaggctcttcagttccctagaattggtgctcttatttacccaaacactcaaaccagacctttctttccttttctttttcttttttaactaacatcaaggttattggaaaattttgatagcttttatgtagcatattttgcttgggaatagcatactccttttgaaagcttctaaagaaagcatataaaaatatcctgtgcattttgtgtgaaagattgacaaaagtatgttttcctaaagaaagttacccaaacaaccagaagaaaagtgaggcagagtaaaaggatagacaagggttggttgatggttgacatgtgaaacgctttaccattcataaaatatttaggttatttgagctaaggaggaaattgctaaggattaggtttatagcacttgaccatgtctcagaagtgctactctgtaaaacttgtcaaagaggaaaaaagaaaaagaaaagaaagcaatcccattaggcaacctggactttgcatcctgtcgtttattaaatttgtcagttgaggcagttaggattatggcagtagatttattaatttttcagaaaacctggcatggaaaagccttatccttggcactagcctggaaaatgcagagaagaaagtttgtgaaacaagcagaatgctgaatacctacagtgaaaaagtcattagtatagcaaacctgtcccagatgaagccaggtaacaaattttggaagggctagattcctgaaaaactgcgagattttattcagaatctttttgtagaaaggaaaatcctttcttagcacaagtgctacagtggctccactcactgtgggcctggaaaatgacactgtgctccaagcagacgtttgttttcatttctgacattcaaaagtcattgtcatcaatgtgtaaagatttattcttgcctacccagccaaaaagcaggacttactcttttccctttacataacgttgggggctgcagcactctgaggtcatcttgctgatgctccatgccttggatgatgggtgtggccttgtttgagagtggctgtggtctgaggcaggagtgggggcagggttggggtgtcgtattcatgactttttttttttttttttttgagacaaagtttcagtcttgtcacccaggctggagtgcaatggcgcaatctcagctcactgcaacctccgcctcctgggttcaagtgattctcctgcctcagcctctcgagtagctgggattacaggcacccgccatcacgcctggctaattttttttgtatttttagtagagacggggttttaccgtgttggccaggctggtctcaaactcctgacctcaggtgatccacctgcctcagccttccaaagtgctgggattacaggcgtgagccaccgcgcctggccctcatggccttttaaggtctttgttattcattctggataccacagaaagaagattcctgttattttctgctaccacttactgtagactcaagttgctttatttctttgttttctacccaggaaggtgtacagggcatacagagggttctatattgtgtacagaagttgaagctatagtgttcttgatttaataataataatcataaagtgtctactatacttcaggcattattttaaacacttcacacatattaattaacttaatcacacaatttgtatcctagccctatgaggtagtagctattattgccaccatttcagagatatggaaacttgagacagacacagttaagtgccttggctgaggtcacagagccaggaagtgccactgccagggtttgtgttcccaggcacatcctgacactgatctcaagcagtcatgcaatggtggcagacaatgtgtttaatgtgaaccagatcaacttgttcacacagcaatagttccattgtgagtactaataggtagaaagaagaagattcctgccagcaagtggcttgatagtgaaagtgtgtgaacactctccagaatagagtgaaagggatgaagaccttcgttacttctacttcagcatacacatgagccatccggggtatttaacttttcccccacctgcagaaatgtctgattcagcaagtcttagtgggatttggaagctacatttatgtaagcaatcccaaacaattcagaacatcttgtgggggggaggtctgagatgtatcttgttagagatttgtgccttattctcataggcttgggttatttcaaaaaggatagagagaaaatgttaccctaacatcttgccaaccaggatgttgtggatgtatcttggtaagaaactttacagtattcaaagtacttcatcttgaggggtagatttcacgtggacaatgaagaaggggttgggagaagctggcaatagtgagccagtctagaatcttaaccataaaaatgaagactgagttttttcacaggaggatgccccttcttctgggaggtacagcagatggcagtgtgtattttctagaaataagttcagaattgaaatcttgtgggacatttcaaattgggctgaactttgaactcatgtttatataccttggacataggaatggggggaaaataacaaccctaaagatgtttatgtaatatatggtttatcacatgtgctcaggccctctgggtcaggatgtatacatctaaaaatgccctcataagtgcattggatgaggatctgaccccatagaccagcttatatagctcttgtgaacaagaaaaaaaatctgcatctagtcttacattctcttctagcaaatgttaagcatggccaccgagaaacccagtcattaaaaatgaaaataaaacaaaaactatttcctatgatgtgaatttaaagaacagactcttttttttcctgaatggaaacagtgacttgaaatggagtacaattaagctaaataagaggaaacagtgaaattttgtagactatggaatagtctcactgggaacattatggaagcctcatcacttagtcattacaaactagaccagacaaatgaattgaagatatgctgcaagaaacaatgtcatagggaagggataaatgaattttttttctctatccccctgtggaaatttccccagtggtgtcagcactcagacacacacacacacgcacacaccacacacacacacacagtcaccttcaagttgtcttcttgctgactttacaatgtgatcatcaccaaaatggcatttaaaaccccccaaagcctctttctatttctgggtctacatttactgtgtattctgatcccctgtcttgttcattatggataagattttctgttaagattataaaagccttacggtttccacttcgtcatctttaaagccatgtaaacaccttccccagcaaagcctagtgattgcaagtagtgagcggtagaactgaaacccaatggagatggaagaggacaacccaattctgttcaaatggtggtttacagaagctgttcacttcagcaggctcatttaacttacgcaacctaaaaaccactgagccttccttccatcccttgagtcacatgtgctttctatagatagctggtagaaatcacaatattgaaaagtcaattacttgcatatttggagctaaaagtggggatttgaagtatgaccatccccagtgtttcttattctatagagtgtagcctgcaccagaaaatatataaatgaccagattttattcaccgtttgttccattttctatcactagctacaataagaaattcaaatgaaatttaaagattactgtggctatccatttaaacacactatttttgattcccagattataggaaattagcaatcggttgcatgtttcttaaaaaaagctgtttacctattacaagtagttgatgataatggaaaataataacaccaatttttatcaactataattttatttggaagacaaggcttttctattatacttcattccttttcttgttgctcatgggcaagataaaactaaattttccctcttgtcttatgcaatgtaataaaaaataaaatactagtaatagtaataatgaaaagtagcaaccttttatagatctgtgatatatcctcacagatatgtcaggccttgcaccaagtccttcatggatattgttccattttatgctcacaacagctctctaagtaaaatattcttatcttaccgatgggcagcttgatcttaagagaggttcaactgtgcctaaaatcatgtgagcatgtggcagagccagattcaagcccatttttttctgactccaaagcctgtgcctttaattacctgccatgtgcctcaaattccttaagtcttaagggaattattgtatttcctatgccctctcttccctcatattgcatcttcttattccatcctcatgaaggaaacaagagttcaccacccaaaataatatttttgaacaattaaaaataatagacacaactactattaattttaccagtgattaaaatgatcacaaaagtaatatgatcatgcaactagacacaaattctttgagtaacctaaagaaatcaaaatttaaatttaaatttctttagggttcttaaaatcagataattgaaaaccatttccagcacatttgtgctgttgcatttgtcttttcaaatgctagttttattgaagactgtaaaatatattgttacaatctacagtgggaaggacagtgtgttgattacattacttttggaagaggaggaaacgatttatattacttttctacctggtcatctagaaagatcaacttcaaaacccaagaaaattcactttccacatgaaaagcagtctatggtagtatgttgactaaatggagcatggggttttgagatgatagtattttattattctttgtcgcaaaggggctaatcataatcatctaggaattgattatcgccttacaaagaaaagtgtgtgtaaacttcttcttgccttccaaaagcttacaagttttggcaactttgtacatcttgtgcataaatataacattgggcataaaactaagagaagaaatgcttacaaaagatttaaatcaatgcttacttgagcaatacagcattgatctagttcttttatttttccctcttcaggtataatagaatgcaagtttcatgagggcagatacttgggacttgttaattaactgcagtctctctaacatttagaaaagtacctgacacataatagatgcttaataaatatctcttagataatatgagctttaagaggaggaatcatggggatgccacacctcatcctgcatctgtttatatctacgagttgaagtagtgaggtcatctacctttgtctttgtaagaatatcactgtccgggccattacccttctcagaaaaaaaaaaaaatactttcaatgcaatcagcatttgtggatgatttaaagatggaatatcttaagtgaaagcatctgttggaaaacatgataaggtactcagagacaaagtccttgtcatttatatgttctgaatgatgcctagcttcccataggtaaacactgagacctaaattgccataataaaagatcagtgccattgccattaaaatgcactgtgtttctactatcttgagtgcagaaaaagaaaaaatgttggcatcatagggctgattctgcacccatgtggaatgatttaattctgttaataatgctagaaatgttaagaaaacatttgggggagggaaaggcagaatatgggaacgtgcaaaaccagccttgtttcatctgaactccaggatcctgcgttttcccttgtttactgtacttattctggatctgttttcacttttatttgtggtcagcttcgatatgtctacacgaaagcacacttcagaagtaaaatgactctgtctttttacagtatgacttcagacagttggacagtttaggatgcactggttcctggatcaattttcccatgcctgcttaaggcatgctagttaatatactgcaaagagaaaaggcattgtctctaaaggcacatgaatccaaccattgagctgggttctgggtgtacgccatgccctttgagcctcatgcatagcaccccagccaaattctgcccaccctcagaagttgagccttatgcataccaccccagccaaattctgccccccggaagttctcatgcaattttcattgactatagtaggactcatctgggtgtgtccaagggcagaatctggctggctacatgtaacataatgtttgggttggggcatgaggccaaaaaagcattgtttactatttatatgggtcttcaccaatttctggactctaaaagagatgaactcactgcttctgaataattcattcatcaaagcagacatgaaaaattttgttccttgagtttagttagaaagcaaagcatttgctgtttcactgtctggaagccaaaatatgtttggggctctccacttcaacccaagctgacattcccaagctgacagcatcttaaagcaagatgacttgctttcttgcaaagaggcaggcaattgtggccatgagggtatgacaaagacattgagattgccttgaacctccctcaaggtttcctacaaatttcacgttcctgtaaaacatttggggctaaactatggtagtagcatagaatagggtgttgctctgacttggactaaaatcatttgtttgtgtgtatgtggaatgccatctatggcacgttagagacaaatgccaggaatatgaaacagtgaggaggaaaggctccttgaaatagtgcgtgcatcttagaaagccacctggggaatctgctgagaagggatggctagatatactttcaaatcctcaaatatcaagcatccaagtgaaacccattaagtttgatgagttactctgtttgtaaaagaaaactaaaagcttatagaaatttcaaattttcaagtacctagggctagatattctgtaataagttcctgcttttaaaaaggggcgatgtctaaactctgtaacgttggtggagttttgttctcaaaggttcccaggtggtcctgagtagcccatttcagggttttatcaaaccctgacatgggcaagacttacagatgttcaaccctaaatccaccctgctttaaatctcttttatcttgttcatatttatatgaatgtttagagtgaaatcctcattaggaattttttgaacattgagattcaagtcagccttagtgttcccttctcaaccattatcattgtaatcttccctgtcaacctgattttcctctctttgcttatcttttttacttttttccctacattttataacattagaggaattatggtggttctgaatgatcttgttgtcttatacccatccttggttttcctctcttcccccttttatttgttttgttaggaaaaacatcatcatgaatattgattctgaaatcaggttctaatttccacatatttgtattcagagtgactctaccattcaaccaaatttctttaactggtccttcacaatatattcaatgtaatagaatatattaaaatcaataatattggtacaaatgctgggatcggaaccttggaatgaacaaatggggtcagctgaggtagaggctgggggtttcaactaggctctacccagctgccctgaggatgagggaatctgtatctcagaggatgcagcatggtctccatgcagctccatgtgcacagcacttggcagtctctggcttcacctctttatatataagtttccagacctataaaattaaaataaggaggatattcactacccaccttctaaagttgtacgattgagtgagttcatgcatgtaaagcacttaacacaatgttcattactcaaaagatgctaattggtaatagcagtagtgttagtagtggtagtagtagcagtagcagttgcagtagctttatttctttacagtcccagaagttagagagaatcattaagaagttatagtccaatgttatttacatttttcagagaacatttatattatttttttatttttattttgagttctggggtgcatgtgcaggatgtacaggtttgtcacataggtaaacaggtgccatggtggtttgttgcacctgtcaaaccatcatgcttaatgttctagaacaagaaattttgacgtgaggtctcacaggataaaactgcaataaactaagacaagtgagaagggggatgggtagagaagaggtttccacagcccgtagagtctggaggcaattactcagtttctccgcagaaacaggtgaaagtgtccaaggcctaggctgtacaaataaagcagtcaaaaagctgagatttaggaaaggatgatggcccttgacaaagcatctacaggaagaagctggacaaacagaggctcagaaccatgatgaggctaacttggggacagtctgagttatgatggaagggctatctgactacactggacatgtcccatggtgtattagttagggttctctagaggcacagaactaagaggatagatgtatatataaaggggagtttataaggtgtactgactcacacgatcacaaggtgaggtcccacaataggtcatctgcaaactgaggggcaaggaagccagtccgattcccaaagctgaagaacttgggagtccaatgtttgagagcaagaagcatccagcacaggagaaagatgcaggccagaagactaaaccagtctagcctttttatgttcttttgcctgcttttattctggcctcacttgtgtgtctacccagattgagggtgggtgggtctgcctttcccaatctactgactcaaatattaatctcctttggcaacacccacatagacacaccgaggaacaatactttgcatcattaaatccaatcaagttgacactcagtattaactatcacacatggctactccacccttaccctgtttgtcaataaggaaagcacaagagcaggtgagggcagccaagagacttggcagtggatttcaggcctgagaaagctgcttaatttcaaggttaacctgaaggactctgcccttgagactggcccctggcctcacctgaagacagaggccatcagacatcccagcagcggaagcctggacagtctgaataaatgggaatagccttctggaaaatgaagaatgcttggatttgcaagaactgtattcagccaaggctggattatctgcaaagaggtatgcatatgcttgggcactgtctcctccctcacagcccaactggtccacttccagccatgctccctggggacattgcctccattccccaagacttactcttctgcagtttcacaaagcccagttggtttaaattctttgtccttccattgtccaaacctaataaggaagtcagtcagctgtgggttgggataaggaactggttggtggtaaggaagaacattcctccaagggccttttgatctttaagaggcaataagttgccccattccctgcttttatacaaaaatatctcttgtgtgtgtcattcagacagattgttttccttcccatgaatgtaattgttgtctcttggagattttatgagaaacagaattcaggccattccagagttaggcagaagaggaaagcatatgactttatcttgctcacttcccagacttgtccttttacttgttaatatttgtctccaggagtcatatatttcaatgacaaggcaaaatacccccagacaattcatgcctgttcctgactctgtacctaacgaactgtggaccttggtcaaacattttatactgttgggcctcggttttctcatctggaaacttgggaagttggactggacaagataaatttggcaggtagtgggttattgctatcaaaaacatggattttgcaaattaacatacctgattttcaaccctagttctgttacttgcaaagatgactcaaatgcagcagagcctcagttttctcttataaacaaggttgttatgaagattacataaaataatgcttgtgaagtgcttaatactacctgaatattgtaagtgctaagtcagctttagctcatatttggtgtttccatctatgatttttccttctgaagtaaactttacaatatctgttattttttaccatatatgccaatgatattttctattagtgtgggcaaatcaaaatgggcaatggtaacactatattttattctatatatacaagtgtgtgtgtgtgctctctctttcacacacacgtacacacacccaaaaaagtaacttatttttctaccatcagcagaatctagaattaacttaaagaggttactttaacctagtatggttaaagaagtaccatactaggttttggttcctcaagctctttcacaaatccttccttttgagtcaacagctcatgaagatagtaggtcaatgtttttttcaacttgtattttagattcagggggtatatgtgcaggtttgttatctgggtatgttgtgtgatgctgaggtttgggatatgaatgatcccatcacccaggtactgagcatagtactcaacagttagttttttagcccttgtcaacctccctaccctctctagtagcccccagtttctattgttgccatatgttcctgagtacccaatgtttggctcccacttatttatatgtgagaacatatggtatttggtttttttgtcctgacattaatttgcctagcataatagcctccagctgcatccatgttgctgcgaagtacatgatttcattcttttttatgtctatgtagtattccatggtgtatatataccacattttcttgatctaatccatctttcataggcacctaggttgattccatgactttgctattgtgaatagttctgtgatgaacatatgagcacatctgtctttttggtagaatgatttcttttctttttttttttctttgagacagggtctggtttggtcacccaggctggagtgcaatggcacaatcatggctcactgtagcctcaacctcccaggcccaagcaatcctcccacctcagcctcccaagtagatttattttcttttggatacatacctagtaatgggattgctaggtcaaatggaagctctggttttaggtctttgagaaatctccaaactgctttccacagtggctgaactaatttacattcccgccaacaatgtataaatgttccttcttctctgcagcctcaccagcatctgttgttttttgactctaataatagccattctgactggtgtgagatagtatcttattgtggttttgatttgcctttcactgatgattagtgatgtggagcattttttcatatgtttgttggccacttgtatgtcttcaacagatgtgtctgttgctgtcttttgcccattttttaatggggttatttgtattttacttgctcaaatgtttatgttccttatagattctaggtattagacctttgttggatgtgtagtatgtgaatattttctcccattccataggtcatctgtttattctgttgatatttcttttgctgtgcagaagctcttattttaattaggtcccacttttcaatttttgtttgtgttgcaattgcttttgaggacttaattataaattatttcccaaatgcaatgtctagaatggcatttcctgttttcttgtaggattgttatagtatgaggtcttacatttaaatctttaatccatcttgagttaatttttgtatatcgtgaaaggtagggttccagtttcattcttctgtatatggctagacaactatcccagttccaggtattgaatagggaatcctttccccattgcttattttagttaactttgaggaagatcagatggctataggtatgcaactttatttctgcattctgtattctgttccattgttctatatttctgtttttgtaccaataccatgctgtttttgttagttactgtagccttataatatagtttgaagtcacgtaatgtgatgcctccagctttgttccttttgcttggcttactttggctatttgggctcttttttggttccatatgaactttagaatagttttttcttctcttctgtgaaaaatgatgttgatagtttgataggaatggcattgaatatgtagattgctttgggctctatggtcatttaaatgatactgattcttagaatccgtgagtatggaatattttttcatttgtttgtttaatgtatgatttcttttagcactgttttatagttctccttgtagagctcttttttgtccttggttagatgtagtcttgggtattttgtttgtgtgtggtggtttttgtaaatgggattattttcttgatttggctctcagcttgaacattattggtgtatagaaatgctgctgatttttgtacatggattttgtgtcctgaaactttagtgaacttgtttatcagtttcaggagcctgtgatggagttttttgggttttctaggtgtagaatcataccgtccttaaagagagatagtttgactacttttcttatttggatatattttatttctttgtcttgcctgattgctctggctagcatttccagtactgtattgaataggagtggtgagagtagacatcctggtcttgttccagttctcaaggggaatgcttccagtttttgcttgttcagtatgaggttggctgtaggtttgtcatagatggctatgactattttgatgtatgttcattcaatgccaagtttcttgagggtttttgtcatgaagggatgttggatttttttgaaagctttttccatggagatcatatggtttttggttttgattttatgtttatgtggtgaagcacatttattgatttgtgtatgttgagtcaaccttgcatcctagcaatgaagcctacttgatcatggcaaattaactttttttgtgtcctgttggatctggtttgctaatattttgttgatgattggcctgtggtttcattttttgttgtgtctttgccaggttttggtatcagggtgatgttagattcatagaatgggaccacagtcattgattttttggggatagtttcagtagaattggtaccatctcttctttgtacatcaggtagaattcagctgtgaattcatctggtctggggctttttctgattggtagtttttaaaattattgcttcaatttcagaacttgatattggtctgtttggggtttcaacttcttcctgattcgattttgggaggttatgtgtttccagaaatttattcattttctctagtttttttctagtttgcacgcatagaggtgtgcatattagtctctgaggatcttttgtatttctatgagatcagttgtaatgtcacctttgtcatttctgattgtacatatttggatcttctctcttttttttgttaatctagctagcagtctattgatcttgtttatcctttcaaagaaccaactttggattttactaattctttgtttggattttggggtctcagttttgtttggttctgccttgattttagttatttatctgctagattaggggttagtttgttcctgtttctctacttcctctaggtgtgagattagattgttaatttgagatctttctaaccttttgaggtaggtttttagtgctataaactttcctcttatcactgtttttgctatgtcccagagattttggtaggttgtgactctattttcatttatttcaaataattttttgatttctgccttaatttcattatttaatcagaagtcattcaggggcaagttctttcatttgcccttggctttgagaggtcttcttcgtactgatttctaattttgttccactgtagtcccagagtgtggttggtttgattttgattttttaaaaaaattattgagacttgctttatggacaagcatgtggtcaatcttaggtaagttccatgtatagatgagaagaatgtatcatctgtggtaatgaatggcatattttgtagatgtcttttgggtccatttggtcaactgtgaaatttaagtccagaatttctttgttagttttctgccttgattatttgtctaatgctgtcagtgagatgttgaagttccccactattattgtgtggctgtgtacatcttttcatatgtctaaaagtacttgttttatgaatctgggtggtccaatgttggatgtatatatatttaggatagttaaatcttcttatagaattgaactctttatcattatgtaatgcctgtctttgtccttttttactgttgttggtttaaagtatattgtggctgatataaagatgggaagcaacttgtgctctctttttgccttcttttgtgtggtggatcttcctccaagtctttactttgagcctatgggtgtgtaagatagccttatgtgtaagataggtctcttgatgacaatagatggatgggtattatttatccaacttgccactctttgccttttaagtgaagcatttagaccatttacattctaggttaatattgatagatgaggttttgatcctatcgagaaattgttagttggttgctttgtagtttctattgtgaggctgcttgatagggtctgtgggctatgtccttaagtgtgtttttgtggtagcagttttcattatttcatttctatgtttagaactctcttaaggaactgttgtaagacttgtctagtggtaatgaattcctttagcatttgcttgcccggaaaagattttcccttcacttatgaagcttagtttggtgggatatgaaattcttggttggaactctttttccttaggaatgctgaaaataggcccccaatctctcctggcttataaggtttatgctgagaagtccactgttagcctgatggggctccctttgtaagtgagctgcttttaagatttttttctttagtgtcgacctcggatagcctagtgactgtatgccttgatgacagtcattttgtgtagtatctggcaggtgttctctggatttcttgtatctggatgtgtacctctctagcaagataagggaaattttcttgaatgatttcctcaaatttttttttccaggttatttactctttctccttctgtctcaggaatgccaatcatttgtaagtttggtcactttacataatatttcttgacaactttattcattttttaaaattatttttttctttatttttgtctgacttggttagtttgaaagaccagtcttcaggctctgaaattctttcttctgcttggtccagtctattgataaatctgtcaattatattttgaaattccttaagtgaggttttaaattccagaagctctgtttgattttttttttaaagatgtttacctcttccttcatttccttgattgctttagaagtttctttgtgttgatgttcaaccttgtcttggaggttgagcttccttgcaatccatgctttcaaatctgtcatttctgagtttccatttttgtcaggagccattgctggagagctagtgtgatcctttgatgctgtcaccacattcaaattcctcatggtgccagaattcttgcagtggttccttctcatctggagatgctagcacttctaatttttataattattttagtgtgggtaggatttttctttttctttcttgcctataatattatttttttctttaccattccctcccttcctaggtgatgtgactgtagagaatgctgggtagggtcttttggctttgtttctatagccccatgcacttctgatggcaggttttatattgggctctgcagtttgacctacaagcttgtagatggcgcttataggtaagagccagctgcagccaacatggttggatatatacttgatccttgcttactaggagaagccctctgtttcctcaggcaatgggctaagctgtggagtgcacagtggtctgagctccctcctcagccctgtggggttgggggccaagatgggcagggctagaccaggcaggtcctcctccaggggccccgatggcaggcatgagcaccagtgctgagggtgggtacagtgagcagccactgagcacccagaggtgtgcctaggcatggtgctgggaaacctccttggcctaagttctctatgtgggactgaggggtagtttaaactcctaggagaataggtactccagatgcctggaggtctgcctggttatggggtagagagggccccttgcacccaggatctctgcacaagaaggctggggaagtttaggccactgttccagttgggtgggtgatgtgaatgcctggagatgtgcctgagtgtggagcagagaaggtctccctacaccaagttctctgctcgggaggggcaggatgactaaggcaagcatcctggagatttgcctgggcatggagcagaaagggcctctctgcatctggatctctgcataggaagggtggggtagttcaggctgctgaactaaatgagtgggtgctctaaatgcctggagatttgcctgcatgtgaagcagagagggcctccctgtaccaggatctctgcacaggaaggatggggcatgtcaggctgctgatacaggtgagtgggtgctctgaatgcctggatgtctgcctgtgaatggagcggcaagagctctgctgtaccacagtctatgcccaggaagggtggtgcggctcaggctgcgaaaccacacaagtgggtgctccaaatgcctggatttctgcctgagggtgaaatggagagtgccctgctataccacaatctcagaggagcaagctggggcacccagcaatggtagatgcagaccagttccacgttgccaagctggcaagtctcactgcccaagagaaactacagctgtagcagctctccttctgcctgaggcttgcaatgtggggagcacaattctagcacctactgctgaggtgccttctacagttcgggctgtggaggcccctaccccactccaaagcaagtcttgctccagcctctggtccaagactaaaataccaacacagtcatgctgctaggtcagcaaagaattcttgactttatgtggtcctgcattaaaaatggcaccctgctcttggtcctaggctagcctggggaaaatgtattgagctttttgtggtgtctttctcttacaacatcttcaatcctttccccaagttagcactagggcttgggagaaacaaagtgttcccccttggcctgggttgcttggatctccactggaaaggtgagcttcagagggaggctttctgcctctctcatgtactggggttttactcatttttatcagccagacaccatcacaggggctgtttgctggcatttttctccctggattctggtttgttcttcaagattccagtagattcctattttccttcttgaatgaaagttcacagagttgatctttatgcattgtcttgctatctccaagtggctgaggcaaactaaaagcctctcatctgccatctgggatggggtggggtagttggtcaattttaaggctaaagaggttactaaggttattctttagcaagcccattgtatgcaaagtaaaggcctctgtacatatggaatgaacagaatcttaataggtgaagttatcacaactctgcaatattagctatggccattaactccagaaccagggcttggtttggtaggagtatacaagtgagaagtcaaataagagttgcatgaagatattgtaaagaaagagtataagaagatgatgagaatagagttaagttaaaagtgtttgtctgtagtgtctttggggagaagtttggagattacaaaccaacacttctattgtccaatatcacatttcccattcttagttgagttggttttgatataatttgaaggctggatcttcttcatttttgtgtatggtacaggcaattctgactttttacttatttatccactcaaaaaatagtagtaagtacctatagttggccagcattgtgttagattttaaaactggtcctctacccatggggaacttaaatttttggaggagacagatgagaaagtcaaccctctcagtacaataggtggttctttgaaagaggtattcagtagatactatgagaacacagagcaggaacacccaagtcactggggagtcgggggaaaaaaccctgaataagcagtgatagaggccgggagtagtgaagacatactggagagaagttaaatcatggagtaagtaagaatagtgactggacttagaatcaggttactcactgggggatttaggataacaattatatcaactactgatggaaggaatacaagacaaagagctattttatgcaaaataatgataatttttgtcttaaccatgtggaatttgaggatcttgtggtacatccaaaagaagataaggtatccagcaaacaactgtcattaggattcaaatggaggttggagccatgaacatatatatagttcttcagacagagtatatagactgaacaaaagtaggcaatgggatgcctgaggaagaaccatttttaagggttgaaatgagtaaatagagatggcaggaaggaagagaagaaatagcttcattagtagaaggaacatctggaagagttgtattacataagccgagagagagaacttctagaaggaggtagtgatctgcagagtcaaatattacacatgtaatataatggttgctaggtgggctttttgctagctaagaaatgttcattcaggttctcttgacaaagaaatcaagaaatcaatttgcttaattataactatacactcagaaaatgaagtagacagaaactctactcatgcaaccaggttctgagagaataggaaccaaggaatgccaggcctcataaagaatggactgcagttcagaaactaggagctcaggatataacgcaactcttgcaatcaggatattttgttacatcctcaataggaggtgcaccctggtctgtctacaggcagtctgccatcaacctaattctttgttactctatggaggtctacacaccttggatgcacttccatattaccatctctagaccagctctttcaagagagaatctgattggcctagtttatccccatgtttctaattagagagggacctcatagtccatagattggtagctattgaatcacttgtgttgcctcacccccctggggcccagtcagctgtagccagggaaacaaagtaatatggtacccagaacatgactacttcttcataaagaactggtaaggactgctttcctcaaaaaggggcagtggctgtggaagatgcttcatgttttaaagcctgtatcatggacattaataatgtagaagtatatgtgtacctgtgagagtatcttcaacactggagataaacactggaattgggatcttaatggattgaagagtaaatgggaagtgagccagtggaggcagggaatatagatgaatctttgcaggaaggagggtaagagatacagtaccacagcaaataggaaatttgtttccaaggtaacattatctttttttaaatatactttaagttctagggtacatgtgcacaacatgcaggtttgttacatatgcatacatgtgccatgttggtgtgccgcacctattaactcatcatttacattaggtatatctcctaatgctatccctcccccctccccccaccccacaacaggccccagtgtgtgatgttccccatcctgtgtccaagtgttctcattgttcaattcccacctatgagcgagaacatgtggtgtttggttttctgtccttgcaatagtttgccgagaatgatggtttccagcttcgtccatgtccctacaaaggacatgaaatccttttttatggctgcatagtattccatggtgtatatgtgccacattttcttaatccagtctattgttgatggacatttgggttggttccattggtctttgctattgtgaatagtgccgcaataaacatatatgtgcatgtgtctttatagcggcatgatttataatcctttgggtatatacccagtaatggtttggctgggtcaaatggtatttctagttctagatccttgagaaatcaccacactgtcttccacaatggttgaaccagtttacagtcccaccaacagtgtaaaggtgttcctatttctccacatcctctccagcacctgttgtttcctgattttttaatgatcgccattctgactggtgtgagatggtatctcattgtggttttgatttgcatttctctgatggccagtgatgctgagcattttttcatgtgtcttttggctgcataaatgtcttcttttgagaagtgtctgttcatatccttcacccactttttgatggggttgtttgattttttcttgtaaatttgtttaagttctttgtagattctggatattagccctttgtcagatgggtagattgtaaaaattttctcccattctttaggttgcctgttcactctgatggtagtttcttttgctgtgcagaagctctttagtttaattagatcccatttgtcaattttggcttttgttgctgttgcttttggtgttttagtcatgaagtccttgcacatgcctacagcctgaatggtattgcctaggttttcttctagggtttttatggttttaggtctaacatttaagtctttaatctatcttgaattaatttttgtataaggtgtaaggaagggatccagtttcagctttctacatatggctagccagttttcccagcaccatttattaaatagggaatccttcccccatttcttgtttttgtcaggtttgtcaaagaacatattgttgtagatgtgtggtattatttctgagggctctgttctgttctgttccattggcctatatctctgttttggtaccagtaccatgctgttttggttactgtagccttgtagtatagtttgaagtcaggtagcgtgatgcctccagctttgttcttttggcttaggatcgtcttgacaatgtgggctcttttttggttccatatgaactttaaagtagtttttttccaattctgtgaagaaagtcattggtagcttgatggggatggcactgaatctataaattaccttgggcagtatggccattttcacgatattgattcttcctatccatgagcatggaatgttcttccatttgtttgtgtcctcttttatttcgttgagcagtggtttgtagttctccttgaagaggtccttcacatcccttgtaagttggattcctaggtactttattctctttgaagcaatagtgaatgggagttcactcatgatttggctctctgtttgtctgttattggtgtataggaatgcttgtgatttttgcagattgattttgtatcctgagactttgctgaagttgcttatcagcttaaggagattttgggctgagacaatggggttttctaaatatacaatcatgtcatctgcaaacagggacaatttgacttcctcttttcctaactgaataccctttatttctttctcctgcctgacacccggccagaacttccaacactatgttgaataggagtggtgagaaagggcatccctgtcttgtgccagttttcaaagggaatgcttcccattttcgcccattcagtatgacattggctctgggtttgtcataaatagctcttattattttgagatacgtcccatcaatacctagtttattgagagtttttagcatgaagggctgttgatttttgtcaaaggccttttctgcatctattgagataatcatgtggtttttgtctttggttctgtttatatgctggattatgtttattgatttgcatatgttgagccaaccttgcatcccagggatgaagcccacttgatcatggttgataagctttttgatgtgctgctggattcagtttgccagtattttattgaggatttttgcatcaatgttcatcagggatgtttgtctaaaattatcttttttttgttgtgtctctgccaggctttggtatcaggatgatgctggcctcataaaatgagtagggaggattccctctttttctattgattggaatagtttcagaaggaatggtaccagctcctcctcgtacctctggtagaattcagctgtgaatccgtctggtcctggactttttttggttggtaggctattaattattgcctcaattttagagcctgttatttgtctattcagggattcaacttcttcctggtttagtcttgggagggtgtatgtgtccaggaagttatccatttcttctagattttctagtttatttgcgtagaggtgtttataatattctttgatggtaatttgtatttctgtgggatcggtggtgatatcccctgtatcattttttattgcatctgtttgattcttctctcttttcttctttactagtcttgctagcggtctgtcaattttgttgatcttttcaaaaaaccagctcctggattcattgatttttttgaagggttttttgtgtctctatctccttcagttctgctctgattttagttacttcttgccttctgctagcttttgaatgtgtttgctcttgcttctctagttcttttgatgtgatgttagggtgtcaattttagatctttcctgctttgtcttgtgggcatttagtgctataaatttcctctacacactgctttaaatgtgtcccagagattctggtatgttgtgtctgtgttctcattggtttcaaagaacatctttatttctgccttcatttcattatgtacccagtagtcattcaggagcagattgttcagtttccatgtagttgagcggttttgagtgagtttcttcatcctgagttatagtttgattgcactgtggtctgagagacagtttgttataatttctgttcttttacatttgctgaggagtactttacttccgactatgtggtcaattttgtaataagtgcgatgtggtgctgagaagaatgtatattctgttgattttgggtggagagttctatagatgtctattaggtccgcttggtgcagagctgagttcaattcctggatatccttgttaactttctgtctcgttgatctgtctaatattgacagtggggtgttaaagtctcccattattattgtgtgggagtctaagtctctttgtaggtctctaaggacttgctttatgaatctgggtgctcctgtgttgggtgcatatatatttagtatagttagctcttcttgttgagttgatccctttaccattatgtaatggccttctttgtcccttttgatcttttgttggtttaaagtctgggtaacattgtcttttaagatagaagatacttcaccctagttatattgtaataggaaagagaaattgcatatgtaggggagaaaatgattgatagactgaggtccctgaggagctgcaagggaaccttgtagagcactgttttttaccttactcacacgtacactcatcagtggactctcctatctgaggtaatctcatattgttgaacgtggagaaatcctgaaagagatatggggaaggaataaattgaaaatgagagtgttaaggaaatggggaaatactatgggagttggcagctagaaacacaagttaggaaaggaaagagtgggaaattcagagaaagtgaagaatcagtaagcaagagtttgactaaatattccgaagggataggttataagtcctcctgggtgttctgatgactccaagggctgcttatttattttgctgcaaggaaaaagccacaagcatgccttgattgtgatgtccctcataactcactaccatagcaggcaaaccctcaggtattctagagctttttgttttgcatcagtaaatatttgctgccattgtatcatcttagtaatgatttaccatacatcctatttgaatttcatggagcaacccccttaaataacttttaataccagagataatcccagtggctaagtcaattagatcttaaaaatagaacctttgttaaaaggtcactccgatttctcttctggtgttgggttctgacactgataaattgtccccagactcctctcttaacatcttaggttaagactgtctctactacatacatacaccagaagcactgagattttttttttcatttaaaaatagatccaaaggcaaacatatttaaagtggatttcctactatggcgatttcaaaacctaacactggagaatgaaggtggtaactgtcgtttcacatgtgtactcagcaaatgcaatttctactaccatagttttccttttcctccacctaactctactacactgcttattataaacagtagttggaaggggtagattttataagcatttgggatgtgcattttcatccttgagtagaaaatggacctcttaaaaattttcatttacttttctttcctttcctcttccttctccttttttgagaaggaaaaatgaaaaaaagtatttgaaaagaaattaagaggtggcatgtatacttaaatttttatttcccttaagtttcaaatctgggattcaaatagcgacagacttaagagaagggcctggcatcactcctagtcccacgaaattgtcctactgcctcttgacagagttaaggccatttgtctcctggttttaatcttattgctaaataatagctaacgtttaatgattacctagtaggttccaagtatcagggataaaaaatgaataagcactggttcttttcctaaaagaactcacactgtagtggtgatgactggggagtggctagattaatgcaacaatttagggaaagtggaagtcagaaggagagaaaatgacagtgagcagtggatgaaaaatttctccctttctctcattcaggttcatgacaagtagctagctaaatcctcaaattaattcactctatgacttcagagggcaaaccatattccttgctcaaaaaaaaaaacaaaaaacaaaactcattaaggaaagaaatttgtctatagcagtaaagctgatggatgttcttaaaatccaaagaatctttcctgttaggcccgcttgccatttcaaagctggaaaaggattatataaaggtaaatgggtatgtgtgtgtgttggggaggcaagaacagagggaggaggggaaaaacatcaggtagagagacagagcacttgtgcagataaaggagttttcttaattgttgtcttaaaatgatggctatggttgaggtaggaaataagcaacacagagaacatacatgatataatatggtatgcattcgttggggtacatgatgcaagctgctacaacaaccgctaaatctcaagtaatgatttcttgcttcttcctgtgtctttgtttcgtgctgctataacagaacaccaaagaatgagtaatatataataaacagagttttattggtttgtagcctagtggctgggaagtcccagatcaaggtgccagtatcttatgtgggacatcttgttctgtcatcccatagtggaaagcagaagggccaacaaaagtgagagcaagaaaaagagagagcagaagtgagtgagcctactcctgataactggcattagtccacttatgagggcagagccctcttaaggccccacctcccaataccatcacaatggcaattaaatatcagcatgagttttagaggggacaaaccttcaaaccattgcagcctgtcacagaccaagatagtcatggaaaaaaggggactgcttcatgcagtctttcaggaacccaagctcttcctgtcttgcaatgccaccatcttcactatgtggtcccagggttagtgtaaagggggaagagagatgttaaaggttgtgcaggaggtgggaggattctggcagacctggaagtagtatacacaaccttcacttgcatttctttggatagaattcagactcatagcccaaaattaattacaaaagaaactgggaaatgtagtctttctgtatgcccagagggaaaataaattgtttttttgatgaacatatggcattgtctgtgacacatggtagtactttcatcaagctaaaattgacagtgataagggtcctacataacaaacaagtgaggtcttgcccttgttggaacactagctgccttgtttttagcattacttaggagagtttgaatatttgtgtctctctgtggcttaaatgaagaacctttttagggtttcaaattttctgtggaagcttcatttgaagtacatggcataggttcgatacttctttctgttttttaacgtattccatgaaataaagaaaaagaaaaacctgacttcttcaaagtcctaacccctccacatgagtaagggaaaaaatggagggggaatctgatgtgtgctcactttgaagaagatgctttctcccagctctgactgtcagagtggactcagctcattaagtaggccaggcaggcgacccattctcctcagccatccgacggtccaaacaggcaaccttcccagttagaggagccctctttttggattaaggttacatagatgcttacattcccagctagaacttctaaaaaagcccccatggcatagaaactcgtatttcaatgttagtattgctgtaggaatacctacatgcccgtatttataaaggaaaactaaatcaccaaaaagttccaacactttatttataatatgcatgttacatatatagtaaagctattttatttttccttaaagatctattttattaagtgcctacagacaatatattaagaaggagacttaagctcaaaatgtaaaacccacaataaacaactcaagtactgcatttttaaatcctcatattgcacggctagttgtctctaagttttaaatggtagttgctaaagcataccatcaaggatgacttttagcaaaaataacagctggctttgaaattaatttgaaaatgaatataatctgtaacaggtacatatacatgaggtgaagtaattcctggcatccttcaactgatacactatcttcaagtttagggcaaagcatttagtattcaggaaaattacacataagattatattttatgatttttttttccctgggagcatatgaacaagcattgcaaacatgctatacacctgtaagaccaagcattatggtaggtaactagggaatatccacaacactagaaagaaatctgcacaatgaatcaggcagagaacagctggtgaagaaatcagatggagaatgggagtaatctgtggaaggtatttgagtttgctataaacattttgcaagcattgggtgaagaagctaagcctctgggcctcacaaccaaagcccaggcttgccgcaggctacagaaacagttttcagaaagtacccagctcctgacaaagagtgaccatttaaacagtatgtggagaatgttgttaattctgactccagggttgtttttgagtcacccacagggcatcagtctttgtaagtattggccccaggtttctagagagtttgacctcttgggtgccctgtatttccactgttaaaacaagtgcattgctagagaaagaaagggtatttcttttaagtattaagtaagtgctgagcaggaaagagctttttgcctatcccttgaggcacaaaataagagcactgtggtgagtaactgagaacttggccaagaaaataaatctgtttaaggtttggaaaactgggtgcaagtttgctttctttcacctccaaatccactagatttttctatcttcattttcttttggtgctttgtgcttcaatttttttgtggtatgcatagttaacatcctgacgaatgaaaaggaatcctctgtcatacaaacaaaggaagaagctcagtgtacttaggccacagcataaaggaggggcagggagggaaagagaagcataggaaagaaaaacacaaaaacacaaatactggagcaaactcagaccgctgggtcaaatgaaaacccatagtgcaaatggcaaaggatcaaaggtgatagggtgtgttgctggggaaggtgctgcccctgctctgatacattccacagtggagagagtccactggaatcgggcacctgctgctttaagagcagagtctcagagaaggggagagaagccttctatggagtagggagaagagagggagcaaagaggctgctggggtcagaagcaagggacaaacagagctgctgcgttttagaggctgaagtgtcatttccctgctcaccagctccaatctgcttctgatttggggctccctgtctgttctcaagtcaactgaaatgtgaaaagctcttaattccagcgaaaggttagacaaaggaagcttggctctgttactaaccacgaggctcatttctcctccggggcgtgtccaggcctggagcttcgggcctgatcctctccttgtctttgtggccaggatacttgatctgcaactcgtttgcccattctcaggggagtctttaccatccagctctcctttggtcttaagcaaggctggcaaagggaaaaagccacaagaacttaaacttcacaaaagcaacaataacaaaactcccccacaccatggaaaccatccagccacagagaggccagcgtgtctcttggtggggttgctttgatactgccagcacagaagttgcccgtctgtcacagatgggtatcagagtcttgaaaaccaatcctgtcctctagcctaagctctgcaatgacagtggtcaagctgctacttcaaaatccatgcctggattcttatgtggaatgtgccctctgtctacctgcatttctttagagcttaaatccaaacattgcctgttcggtgaaggctctgaaataaaaataaaagaggtaattggaacatgagaggatagaacagtaacagtaaccagcaagcatagctcctatgttcagttttactttgcttgcagaagtgaatatgctcatcagttcatgagtcaagtggggctgccccagggtcagaacctctatccccaacccatgggagggctcctatcagggaaggggagcaagcatgttccagttgggggctatagggcacatggtctttcttgtcctgagggtctgtgaagctagcatttaatattgtcacaacattgaatgatcctctcctttctctccaatagctttgcagttaaggaatgaaaaagagcaggggatggagaaaaggcatctggagagctggcatattggggcttccaaagcaccttcatgttgctctctctgcaaagattttgtttcctcctcctattaccgttatattctaaactgtgtctgacttgctacagtaaaaaaaaaaaaaaaaaactcaagaacacaatgttgaattaaaaaaagatacaaaagaatacaaaaatttaccctttacattaatttgaaaaacatacaaaattgtactgtgcattgttatggagatacctttatgcagtaagagctagaaaatgcatgggaaagactgacctcaatatcatcataatggtaaagaccacctccagcggcgccacagttcctgaccttcactgagaacttcccacacaccaggcagtgttctcattgctcactaaagcctcctggagaaggaaaaagaagcggtttggaccgcatgactttagcggtttgggggcatgactttagttgtctttgaaatgaatatagtgagatgggagaccagcaggacttatattccgagcaccgatcatgaccctactaatcaaagcaggatgcagcaaagacaccagccgaaaccagcggatagcaacaaaagtgaccctcttgccctcactgctaataagcataaagacagtcccaccagtgccatgacagtttacaaatgccatggcaacaacccagaagtttccttatatggttccaggaactcccccaccccttttctagaaaattctgaataacctactccttaaatagcatataacgaagactgtgtataaatatagctagccagcaatccataaggactgctgctgctgctgctgctgctgctctgggcagctctgcctatgaaagaaccctgctctggggagcagccactttgccatacactgttgctctaataaacttgccttctttcattgccagctcattcttcagttctttcctgagcaaagtcaagaaccctcctgggctgagccccaattttgggatttgcctgccatcaattgcaaagtggcaaaatgttcacaagttagaaatctgggtggagtgtcagttattttattttcagtattcagcatgttttgaaatatttcataattattttaataaaaagaaaaacaaaagcagtaacaaaaaaaaggacacaaagaatttttgtaagaaagggcctcttttgtcatgtcactttccatgcatggagtggcatctccttcctcagacctctaaaatgctgtgcagtgtcatggtgggttctcctccctttcctccattcctactccacagatgaccatgtccggccctgtgctttcacccatatcactctgtggaggcctccccagtgtctctctctaggcctgcacccttccctagctccagggcctgcatcacatttccacacagacaccaaaagcatatagaaaactcaattcatgtagcatgtggcaaactcaatccaaaatagaatgctgactttccttcaaaaaccatttctcccccagtattctcccattgcagtaactagcatcatctttagagtaaaaaggacaacaatttgattctttctctgcttccttctttctcccacattccaccaccacgtcatgagcacacccaattggctctacttcaccacacacacattgagtcagaatacatctgtgtccccaactgccaccaccccaggcccagagcctcctctcaggtctgctctgctgaccacagtcacctcccagtgcttgcctgccttcacccttgggctaccagtttcttctccatgtggcttttcacaatgtaaactccttcactcaagaccttccaagggcttgagtacctagaagttaggagaaagtccttccagcggtttgcagagcacatatcaacagaccattggtcctgccctcccctgtccatgccccgtgcccatactttttgctccctgcactagtcatgaagacccctgaggacctccttgcaatgtctcaatcaggccctagcagaccctgacagcctggcctttactctgattattccctcttcttagatgcctctttctggatatttctgtggctcactcccactcctcactgaggtctctgctcaaatctcatctattcagagaaacttccctgatcactccatctaacagaacaggcctgccttgattatttctccttggctggattcatgtttctaaggtggcgccaggcctatagtaggcactcaacacacatttgtcaaaacagtgaatgataattattgaccagctcattgcagccattcacacatatgttgattcattgctaccagcaaaagtcctcagaggacagcacagaagacagtaactcggagagtgtgcccagcccctccatggggttgattctgagactagaattcaaatccacttatttttactctaatctttcccctgtaccaccttgcatctctcaaaggaggaaagtaagaaaaagcaacattcaactgtctggtaaatgctgctgaagattgtaataatcacatttacacaatttgatcttcacaaacaccctgagaagtaatgtcgtctcaattttggagatgagaaagctgaaccttctaagaggttaagtatttagcttaagatcatcatttttaataagaaacagaatgtaccccaggcctgcctcatgccacggcctgtgctttcttaatgacattcatcctgcctaaaagttgcattttagattcccgtaaaaagcctgtgtcctatcaacagtgtaggctcacccaatgtttgctgtctggtgatgattccaactctgtcttcttccctctcctgcccccctccctctactgctgggactgttccccagcactttcaccttctcctcattgcttacgcctgctgtggcctcagaggagcaatagccttcatgggccacccagaagttggatataagaaaacaggttaggttggagagagtgagagggagaacagccagtgctggaagacaggcagtgcccaactttcaaatgggtttgtttgctagaatttctttggagggctgtcatacgaaacttcaaacacatttccccatagaaacaatattatcaatgatggatagggtcttgcagtcatccttgaagccctatataatgcagatgtttaaccaagatgctactaaatactcccagaattattgaatctcattagcaagtcagcatcagtcacatggattctgtgggaaaatataaccttgagttccgactgtgaacactaagaacacttctgtttacatgttacacctctagatcctatctctgtgtgatactcttcttactattcaccccaaccccagcctgaattcagcagggctggctataggcctgtagtgtgatgaaggctaccaggcatattaaggaggaagagagtacaggctcacacactggcaggacagcctagagggggctccagggactcccagaggaggagtcttctggcaggacaatagcctatgtttagaacacttatatagtagtaactccagtttcagggcaacagcacatgttggggggtcttgggtgttgtggtacagtaacttaagtgtgcaggggaatgaaagaaagtgagcagtatggagcctgtctccattcacaaggggccgtgcatgcaaatgtgtggctgtccctgtgtgcgtccgggtatctctggagagcactcatgagataggtggtgacacagagtcctgaaaagtaacccagagcaggcatccaacagttctggttcttgctccgcttccttatttgggggattctaggcaacatgaaacctctcagggccttattttcctttaatgttaagtgggaaaaataattatcctccatcctacagggtcattgtgagtatcatctaatatcatattgttgtgaaaacactgtgtcccatttaatgttgtggtagtattaatattataccaagaattacgtaataggacacatgttctcccaaactttatattttttagtgttctgcaccaaacagttaagagaaggatagctataatggttcatacatccactctgggttttctgtttggttggttttttgttttccagggttttttttgtttttttttttttttccggatgtgagcactcctagccacaaagaattagctagagaggaagatttcaggccagatatacctattgcttcaggccttctttgtttcttccactcctactttttttttttttgagacagagtctcactctgtcacccaggctggagtgcagtggcccaatcttggctcactgcaagctccgcctcccaggttcacgccattctcttgcctcaccctcccaagtagctgggactacaggcacccgctaccatgcccggctaattttttgtgtttttagtagagacggggtgtcaccatgttaaccaggatggtctcgatctcctgaccttgtgaccagcctgcctcagcctcccaaagtgctgggattacaggcgtgagtcactgtgccgggcctcttccactcctacttctattctgcatgctgccatcccctcggtccatagacctctgctcgggccatcatcccttgacaggtctgcatattttacctctagattttttttttcagcagtccattttttcttggttgtcccactggaaaggaatctgatcagtactgtttttaaacattgcaataatagtcagatagatcccattgtagttgaagattactggaagaaaaaaagaatccaaactccacatgtaggaatgttgatctgagatgggttgttttccaagacccatcttaacaagaaacattaacaacccaaggaagtttccctgcttggaaagttttttccctttttttctacctgctgaattatttctcccatttgtgatgtaaagttccttacgtggaaagtaaacattgacttaactgactcctgttaaatgactcttttctgtaggagaagccagcctatttagtgccttgccatttcaacatgtgttcatacacttattagttaatttgccagattccctgttttaaagtcccaggctgcattgtatcttttgaaaattgaagtcatgtacacaaaccactttcaagttaggagagacattaaaaataattaggtcctgcaatatttctctagaaccgttcctttcaggatcttggcacgtgctacatcattaatgcatagccacctgctttgggatcaggtgctgcaaattttcctctatttgtttctggactgaatgagtcagtgagagacttggttctaaaacatcccagctggacagtggtgaaggcagcatttagaacagagagttctcctctcccacagcaagttcaaagagttttgtacaagaagtgcatttggtgacggactgtggtaaataccaaactcattaggattcaattaagtaggaccctaccctttattattgtttgaaaatcaatagaaccattagaaattgttttcagcattgttttaacgtgaaatgctagagttgcccactgtggggtgccaatacttcaagtgcatcatcccttctccagggttggtgagttctcttctgtgctgtaaaaacctccctagtcatcttaaacaaaaaatctcagttctgcttttttaactttctgggaaaggtgaagcgtattgcaggagattcaataaaagctgggtgactaggtatgtctttgtgggcaaaatggagaagcatggactggacagctaaatagttgaactgacttgtgaatggttgggtccaaactgtgatgattcttaggctggggggtgggtggggagtagagtttcccaaagacatacgcttggaccccattattaacatttttaatagttacatggagaaagatgttggaggccacgcttttgcatctgatataaaatcagggttaatgatttttccaccagaagtattcaaaagtagactggttataaataggacacacaacgtttcaattagatggagcaatgggccacattaaccagattgcagggttttatttaactaaaaactaattgcaaataaatttattggtggggttactaaaagtcaacttgtgattttagtctgtaaaagtagatgcataatatctagactaaggaaaaagataaacctcctatattctgcgcacctggaacatggcacttaattttggcacaagttatttgactagagatatagataaattggaacccagactggaattcagcagtaagcagccagaatgatgaaagacttatagctatagaacagtttcaaataaaagaaatgtttcttttaaccggcaaaagaatgaagaaaataaaaattatttgccatggctgtttagacatcagtaacaagaaagattcaagcctgtaacaagtgttttgacaggatagtattcggggtcttctccaccctgctcttctaggaggctatggatatgaatccatcgatgtgtcatttgtaaaatggtgtcctttttaaattaaaaaaaaaaattgggactttttagtgttttcattcattatatagattggagctgtccaatgctttattgagatgatagaaatgtctttctttactgtccaatatgatagccgctagccacatgtggctgtcaagccttggaaatgtgctagtccaactgaggaactgaattttagttttatttaagtttaattcaaacacccacatgaggctggtggctctggaccaggacaatgcagttcaagacactgccttcctcttccatttcaccttactgacagcttggaatttggtcttttgtctctttgagattcacctgaaaacataaaagcataagaacaacagaattaaaatctaatttccaaagaactagatgtggactgttttttgtttgttttagattccttccaggtatatcctaaattttatgcccaaattcttcaaatttcttcttacctatgatggctcctacaagcactttcccctatttcttacatgttgaaatattgactacagaaattaagttctgctagtgctctccttctggcaatacctacattccattctatgccaatctccagaaactgttttctgtaaaggatctacataaaacctgatttgtatgacacagcaggcaatctcccaaggcttacaaacaatttggaagaacgtatttgatggctttattgtatattcttactttgtttcaaagcttttaaaaacataaacatatttatggatttgaagtaaagtttagttttagtttaatgttaagcttcatgaacccattattaagtcctctggttcaggtaaatcacttaacttttctatcccccaattgccagatccatccaattggttaggaaaatatttagtactttccatttggaggaaatcattagtatcttccattttcttttttttctttttttttttttttttggtgagacagggtctcactctgtcacccaggctggaatgcagtggagtgatcatggctcactgcagccttgatttcccaagctcaagcaatcctcccatctcagcagctggagtagctgggactacaggtttatgtcactatgcctactaattttttaattttttttttttagtagagatgaagtctcactgtgttgtccagtctggtctcaaactcctgagctcaaacaatcctctcaactcagcctcctaaaactctggtattacagatgtgagccctgtgctcaggcatatttttcattttcttgaaatgggatgttagatacaaaatgaaaagcattaatcagatgtaaggttttgcttttgtttttgttgtcttttcatagcttttaaaacctttttattttgacatatttgtagatttacatggagttgtaagaaattatctgttcacttgatttgcttcagtggtaacaccttgcgtaactatatcagacaggaaactgtcagtgatacagttgactgaccatatgcagattttaccagttttatgcgactcattgtgtggtgagcgtgtgtgtttagtactatggaattttatcatacacgtagatccttgtgaatatacccgtgatcaatgtatagaacgattccatcacaaggatccctcattctgcccttttagagggaccaccacttccctctctccctccttctataattcctgtcaaccactaattgttcttcatctctataattttcttatttcaagaatgttgtataaattgatttatactgcacgtaacttctttattttggcttttttcacttagcataatttccttgagattcatccaagttgttgcttgtgtcaatagttcattcctttcattgctggatagtattctttgatatagaatacaacacctttgtttaactgttcacctactgaaagatatttgtttccagattttgcattacatatgaacattcatgagcagatttctgagtaaattcaagtttttatttctcggggatacatgtttaggtgtacagttgctatatcgtatagtcaatgcctgtatatttttgaaaggaattgtcgtactcttttccagagtgactagaaaaattttatatccccaacagcaatgtatgagtgatccaatttctctgcatcatcatcagcatatggtgctatcaatattccttattttagtcattctgtagatgtgtttcaacagctaattgtgatttttattataattcctgaatggctaatattgaacgtctttatatatgcttttagccacctccatattatctcagtgaaatgtctgttcatgttttttgctcattttctaactggcttttaaaaatttttactcgagttttgagaaatatataaattctaggtactagttctttgttagctatgtggtctgcaaatattttcttcaaatttgtagcttgtctcttcatctccttaacatgatctttcacagaacaaatagtttccattctgatgaggtccaatttatcaattttcattttagattttgcttttggtatcaagtctaagaattcttcacctagtcttagataaagatttttctcctatgtttttattctaagcattttacacttttaattctgtgaccattttgagttattttattattattattatttttgagacagagttttgctctttcacccaggctggagtgcaatggcacaatctcagcttactgcaacctctgcctcctggttgagcgattgaacccaggttgcctcctgggttcaagcgattctcatgcctcctcctcccgagtagctgaaattacaggcacccaccaccatgcctggctaatttttgtatttttagtaaaggtggggtttcaccatgttggccaggctggtcccgacctcctgacctcaggagatccacccgccttggcctcccaaagtgctgggattacaagcgtgagccaccaggcctggcctattttgagttaattttttatgggatatgaaaattaggatgaggtctgttgcctatggatggtcagtcgctctagcaccatttgctgaaaaaactatctttcctctatttaatcgcctttgcacctctgctaaacatcaactggatatgttttgtgagtctatttctggactctctatttctgttccattgactgagatttctatcgctccactggtactacatggtcttgatgattgtaactgtataataatagttaaaatagaatagaatgaatcttcctactttaccccttttttcaaaattattttagctattacaaatcctatgtcttttcagataaaatttagaataggcttatctgtgtttacaggagaaaacaacagttctttcagggattttgataggcattacatccaacatgtgtatcaatttgaggagaattgacatctttaatatgttgtattttcaaatttatgaacacagtatgtctctccatttacttaggtcttctatgatttcttttatcagcattttgtaatgttcagcatacttaaaagctttgttaattttatacctatttcattttgtttggagtaattggaaggagtgttgtgtttttaatttcagtttccacattttccttattactacatagaaatgtgattgctttttgcgtcttttatcttgtatcctaaggccttcattacatctagcgttttgtttgtttgctttatagattactgaagatttcctacatagacaaccatgctatctgcaaataaggacaattttatttcttcctttccaaactatatgccctttatttctttttattgccttattactgggctagaacttacagtactttgttgaataagagcgatgaaaggggacatccttgccttgtttctaatcttaaagtatatagtcttttatcattaagtatgaaggtagctattgggttttgtaaatgctttttagttttttatgaagttgaagaagtgccctctattcttcctttggtgagagttttttttttttttttcacatgtaggtgttgtattacatctaataccttttctgcatcaattgatatgatcacatgatttttctcctttagcctgttcatatggtgaattgcattgattgattttcaaatattaaaccaacttggcattactggaataaattctacttgttcatggtgaatacttcttttttatacattactggattttatttgccatattgagatttttagacataagattatgagatatgttgacccctagttttcttttgatgtactgtctgtctagttttgagaccatatttttattttttagagacaggatcttgctctgttgctcaggctggagtgtactggcacaatcatagctcactgcagcttcaaactcctgggttcaactaatcttcccaccttagcctcccaagtagctgacactgtaagcatgtatcaccctgcccagctaatttttattggttttgagatcataaaatgagttgggaaatattcctccctcttctatattctggaagtgattgtgtaaattcttttttaaatgtttggtataattctacagtgaaaccatagaaacctagaaatttcttttttagaaaattttaaattatgaattcagtatcattaatgattatagaactgttcaacttacctattttaatattttttgagttttggtagtcagtggttactgagtaaaaggtcattttctgagttaaatttttaagagtaaacttttaatgactgcaggatctggagtgatgtcccttgtttcattcttgatatttgtaatttatgttttctctatttttattttgttaaccacaattttgtttccaatgaaacagaacattcaataaacatccaagtgactattctacagtaagtttgactccccagaccagtgatgtgccagtgaatgtgcagtaatgcccaccgagtgtgctacaggaaatgctggaagcctcttgggcaaaacccagaagaggagagcatcccaaatctgttttcaaaaaaaaaagaggttttctcattttctgcttcctttatgggtgagagccagcttatcaaagaaaaaacagatgactcagtgccttaggtatttatcaaagtgtgaaactgaggttttccacctcagttttctagcatgccaactcaaaaatgcatattgctgagcctggccttacacatactaaagcggaatgtgctgtgagtagggctcgttatctaaatttgagccactttgtgaactccatgggagtcatcctgcactcctcagannnnnnnnnnnnnnnnnnnnaggaaaaataaataagtaaaaaggaagtactctcatgagaaggttcccacatgacattttgaatctcataaaagaaaaaaaaaagtctaagtaatataacaatgatgagttataaatttaagagtcctccttggattacactggtttaaaagtttttgtaccttgaaattataaaatagtttatgtgaggaaagtgactattttcatatactataaaaggattaggtagttggcagtctctaaaaatagttgttgtaacataaaaaaaaacacccaaatacatgtctgtgttttaaagagacttagcaggagttatttgatatttgtaatttatgttttctctatttttattttgtcagacttagcaggagtttatcaatattattaacttttttttaagaaccagcttttgtttcattgattctattctcctattttcaatttattgatgtttgatcatacatttatcaataccttccttttacttgcttgggtttattttttactttttttccccctagtttcttgaggtagaaacttagatgattgatttgagacgttttgtctccgctgatgtaaacatttagtgctataaattttcctcacagtactgctttaactgtgtcctacaaattttgacatgttatattttcattttcatttagttgattgaatgttttttctttttttttttttgagtcttcctcaacctacgcatcatttagaagtatgttgtttaatttccaagtgtttggaggttatcctgttgtcttgcagttattgatttcttgtctgagaacatattctatgattttgtggtggtcaccctgcaggactgacctccacccaaaacttcatttggatgttgagacttaggattacaagcatataccaagagggtatgaaaggattattattcacataatgagactttctgaggagtgcaggatgactcccatggagttcacaaagtggctcaaatttagataacgagccctactcacagagattccgctttagtatgtgtaaggccaggctcagcaatatgcatttttgagttggcatgctagaaaactgaggtggaaaacctcagtttcacactttgataaatacctaaggcactgagtcatctgttttttctttgataagctggctctcacccataaaggaagcagaaaatgagaaaacctcttttttttttgaaaacagatttgggatgctctcctcttctgggttttgcccaagaggcttccagcatttcctgtagcacactcggtgggcattactgcacattcactggcacatcactggtctggggagtcaaacttactgtagaatagtcacttggatgtttattgaatgttctgtttcattggaaacaaaattgtggttatctttaaaacacagacatgtatttgggtgtttttttttatgttacaacaactatttttagagactgccaactacctaatccttttatagtatatgaaaatagtcactttcctcacataaactattttataatttcaaggtacaaaaacttttaaaccagtgtaatccaaggaggactcttaaatttataactcatcattgttatattacttagacttttttttttcttttatgagattcaaaatgtcatgtgggaaccttctcatgagagtacttcctttttacttatttatttttcctaataaacaaaataaaattttgctgacacagacaacaaaatgtattaacacaaatgacaaattattcttttattcattcatcaataacttttttacagacaataatttataaatcattatctgagactacatcttcctgttttacagacctttagacttagagacctaagagtatttatatttcaaatttggttctcattaattttgaatatatgatcatctattatagatgacgacaactaaattgatgtttatctttgtgctatcttgttaaagacattcctaaacaaattgttggtttaattatgattacacagggaatgtttcagttactcttaaaaataagcatgctcaaacacagaacaagtacctgttgtagacaaagaattgatttactagttataatccacttgtgtattttactagagtaagttttcttacaggtttgtaagacatctctgacatagtttcatttatttataagaaatgatacatttcatatttttcattacctatgctggattgtgattcaggcaaaattaatgaagtttcaatgtggaaagaaatgtcttcccactcagcatgggctgaggatatcctaaacatttcatagacaatggccatctctacccttagtgtgagaagagagccaattttgtttgttggaaactgtgcagagggccctttggggagagtgaatattactcgtgtatttaattagtacataaaaaataaatgaccatactcagatccacaatgaaactgtgaaaataaaaacatttcagattttcagtactaattagcccttttcaccttgtgtgttaaatacttttaaataattcaaaatatactgggaaagaataaccacagaattaatattaggaacattggagggcattttgtaagcatcagtctaaatagttaataaggagaatatgcagaaggggaagaaacaataaataggaaaatgtttgtgtaccacaacagacacatatcattattattattattatatgaaatttgcaacacccactaccaaagagaaacatgggaaacaaaataagtttattgtacaattgtacaaattacagtctcatagaaataagaaataagacttatgttttccaagtaggaaaacaaataatcatttaaaaaaataacaaaaaatatgttcttccaagaagaaataataagcatttttttaaagtctgacagtgttttcctgactcattttgcatggttcatggagtcttacctattactgtcatactaaaagcttaacatctaaacaaattaaattaaggtaaatttggtatcataccaacacccagatgataaaacctttaagtgaaaagttaaattaccttttgcattcttgtttatttctgaaaatgtagaaactcttcctcttcatttatttgttcatttaacaaatatttattgagcatgttaatttactagactctggacacacaatgcaaagaaaacagataagattcctgccctcacagaacttaaaattgttcttgaacacctgtttttatccaacttataaagtggatctttatactcaaagatttcacacagctgttagaatgtttcatttttggaatattgcagggcctctttcttgtgggtaacatacatgcaagttgcacaattctgtaaagtcaggtgcagtgagaacagacacattgcatttaacattttcttgtctacatgagactattttggttcatgttcagtgaaaatgcctcaccttgcttttagatctgtttgacagaatttgttttttgaggttgtgagcactttgagtttccttgttttagaaacctgaggactgaattcaaagcttggttaaactcaatcagtccctcattcactccctcttgaggaaatacaaagatctctaccattataacatgtacattctagcagagaaagacagataaagaatggtagatgtacatgaaaaggactctggaagaaaggaggtaaactggccaaaggggcgatggaaagtagcagtcagggtggcaggatgaaaaaaagtagaagtgaagctgggcgtggtggctcacgcctgtaatctcagctctttgggaggccgaggcgggcagatcacgaggtcaggagatagagaccatcccggccaacatggtgaaaccccgtctctactaaaaataccaaaattagctgggcatggtggcgcatgcctgtaatcccagctactcgggagggtgaggcaggagaattgcttgaaccaggcagtcagaggttgcaatgagctgagatcacgccactgcactccagcctagcaacagagagagactctgtctcaaaaaaaaaaagttgaagtgagtcagtgtaggcctcactgagcagaaatgtgaaggacgtgagggaatgatgtgagtagattttaggaggaagaatgttcccagcagagaagaatggctggagcaaagttcccaaggaggaacatgcttggtgaacagcaaggaggccagtgtgggtggggcagactgagccagagggagcagtgcaagagaggaaggcacagggtggcttggtgggaagaggagtggattatgtagaaccccatcgcctattgtgaagagcaagggaaagcctcacagtgttttgagcagaggaatgacatgactggacttgtttttaaagggtgactccagctgctttgttgagaatacactgaaggaaagcctgcaggcagggagagctggtagtgatatttcccttgacctctttgcaagacttgtgaaggggtggctcatttactcggcccgcagctctaaacccatcacgggaaggggagtactcaggtgagtgggtgcaggaaccagggcaaatcaacactggaaccagccagttgctcctctctggtgggagcaggctttgtacaggaaccacggcagcatccaagcatgttacaatgcttttttagctctgctgtctgggaaggggtgtctgcaactcccggagccccagaaggcatgtgttacaatcagtgctcttttagcattttccatctgcagatggctaagtgtaaaccagctcagtggagggtcagggtgacagccttttacaccctgccctcttggtatccaagtttttgtccagtgtccaggaagaatcaggtcacccaaatgaattgaaggctggtgtatgcagaggattttatttagaggtggaagtggctctcagtgggaaggggagctggaagggggacagagtgggaagataattttctcctgaatgaccgaactcttctcggaagtcccgccatcaagtcacccctctgaagtcaacctgcttttctctgacatctggctgctgcttctcttctcatctctgctgctccactctgctctcctgccagtggagcttggggtttttatgggtacagggttgggggcagggtgggccagggtggttttggaaaaggcaacatttcgggtgggaaaacagggatgttaaagttctcattttggaccgcaggtccaggcttgagggtggggccctcgccagggaccgccctcttctacccagtacttccctgcctcctgtctgtatcaataggaagctctcacagaaatccagcaagagatgatggtagctagcattaggctggctgtaaaaagtgattggattttgtatgtgtttagaagccagaatcaatagaatttgctgatggattggatatgacatgtaagagaaagagaagagtcaagatgacttcacttagaaatgtagtgcaaaatgtaccaatctgtaagccttgacctccctttagttctatatttcacatatttctagtggccttgttttctattctaggaatctagtgggttttggtttttggtggtttattttttattttttatttttgtctaacattttcagcacttactgatggaatactcatatggtagatgctgtggaggatacacaatgaacaaaacattaattttgttgtcagcaaagatcacaagagataatgcaattagaaagtgaggtacaacactgaggagaagcagatcaaatgttatagggagtcaaagaagggagatgtttctttggactatgggaaaaggggaaggtccaacattaagttagcctaaacagagctttgagaatattgtagacttgaggattgccaagctgagatgcattccattttggcacatatacccacacagcctcaggtccagcggagagtaagtgcagtttggctggaagaaacagcaggggagaaggattgaacaagttgtcctcatattgcacagtgctttgaaccaaggggatgacagaaaagatcagaagtgtgggtgtgtgtgaaagacattttcagagataggactgtggggctagcaaggtataagtaaggccagggattagagtgctgttattgagaggatggtcatgccaaaattcaaataggggcatagagagaaaggactttctcctaaaacatttccatctggactgcaaaggcaaggtgaaagggaaaaactaagatcaattgttcgacaaataattaacatattccctttttcttagcagcaggtttggggggcctaattttcttgattctctctttgcttggaatataaccgtcatttgtgtgatcttaaagactctggggaaggaatagaagatggttgatataagactaattcttttactatagtgactaaaacgttcagaaaaaatttattaaattctgaaagactagtatcatcaagtttacagaaaaacttttcaaagctcatttgaggtaagagccacagataagcacctactatagctctgtttagttgctccttttaaaattgaatcgaaacgtgatctggcttctctgactggaaatttccggttttttccttaatggagcacagaggcagaggaggtgaggagaaggtcactactttgaaggactatggagcttaaaatattctggctatagacttcagctgaaccaattttgttttccatggtgaaatctaaccaaacaaagtcttgggaatgcgcccaaagagcttgtattgaatatttgaattctagaaggcaaagaagaggaagaattgattattttggcaaagagcacgttgtcagcaaggtgtttcttcacccttttgagtattcatgagtgtctaaaataatgacacgcaaacactagtgttggaaaaaaaaaaacagtcaggagagagcttcttccagtcccacatttttcagagacctcagcggaaggtttgggtagcacactttgaggggagacagcatgtttactaatgaatatgaatagtatttccttatgggccatatatttttccagtaggaaatggataatctactatgacatttcagtgggttggaacaagatagataaatcaaatacaagttgccctgtttctttttcaaatgaaagataaatgccttaatggattagcaatcatgaaatatataagtatttataatacagtactgctttataacaccatctgctaaagaatggtatttatccagccactgatatgagagcagattttcttccacattatgcagggaggaagtacatcccagtgttaacgagcacgcactttgtatttaaccagcctaagttctaatgaaattcttcagttgacaagctgtgtaattttgatacagttacttaaccccactttcttcattgagaaaatggtgtcataatgatcctaccttttaaattcatttagtgcatcaaagaaggtaatatatagaaagcattatgccaagtgcttaacacgtgtaagtactcaataaataatagctagtatcatcattccactggccaaaattggctacacacaaaatgagccatttcaaagtatttggaatgtctggagtgaatgctttttaaaggagtactgaggaactagattaatgagtttctcctctagtccaggcaagtgggtctctacactgaaactgaggcatgtgtcaatcttaataggctagtttgtggtgggataacaaacaattcccaaataacagtgtcttaaaacaacacaaatgtatttcttacactacctgtccatcatgggttgacaggtacccaggctggtggaacagtcaccattctcacacactgccaaagagacagggagaccgacagggtcttaaatcaacaattgagggttctgtcctggagatgacatatacatttcttttctttctttctttttttttttttttttttttttgagatggagtctcactttatcacccatgctggagtgcagtggtgcgatctcagctcactgcaacctccaccttccgggttcaagcgattctcctgctttagcctcctgagtagctggcattataggcgtgcatcaccacgcctggctaatttttgtatttttagtagagacagtgtttcaccatgttggccaggctggtttcaaactcctgacctcatgatctgcccacctcagcctcccaaagtgctgggattacaggcatgagccaccacatccggcccacatttctttcattcacaattcattgggctcacacagttttacccaaccccgaagggacaagggtgtgtaatactgtcatattcctggaaactagtataaaggaaagtaaaaaaaaatctcaggacccccaaactcctttgcaaaagggaaagttaagcctggaggctgagtcgtgcaatgcccttttccaaatgaagctgttactggcattatacattagccagatccccacaaggtaaaaggccttgggcatctatgaaagactgctcccacagatcaatcatgggcaaatcttttgctggcctcccagaaacaagggcgtgccaattataactttaggcctgcaatgtaagtctagctcctaaatctaaagtctgttggattccacaccgatggtgtagattacaagcttatctttccaggtgcagaacaaagataagaggagaccaattatttccacctacccagagaaacttgcataatttacacttcctttacttctttttctcttcaaacattcaccttattacatgtaaaatgtagatttacctggcactaactaaagtctcacaggaatgtaaccatccactctaccttgtacctggccctcttcctacatgctttctctcccccttaaggaaatgtatatatactggacagcctgaaaactcttgggaaaaatagccacagctgtgtctatggctcgtgtttttcctggatgtaccctaaagctggcttaataaacctccatgattgagactttttcctcagtgcctcatttccgttatctgcagaaactggaaatttggtggataacactgatgactatcaaagggtcattgatgtggttaaaaatagacaacctatagatactggcacttgaggccctccttattaagttaaaaaacaatgagccaaaattgattcaagcagtagtgatatatggcgtttctgaactctgagtgagactggagacatatctatgttggtggtacataccacaggatgccttgagtttctgggacgcctggtcccgtaagcagtgccatggattgagttcttctgttaaaaatatccaaagccacattttttctctatggccttatctcaccattccatgctagttaaatagctttctctgtttttatatcacatctaatgggtttaatgtgttctaagtgtatggctccatttggtgcattggatgctatggctgagaggtgccatataaaaatattgttattgttatgatgatgagttcaagcactggaagggaaattgtgcaataacttagtactggagctatcattattttcagcaaaatgaagtttggcttcttactacactactaagccttgaagattaaatggtatctacagcatgtatcttagcaatgagccaaagaagtccaaagaaaaaatgtttgttataacaaacatttcatatattataaaacagatgttcacttttatgtattcttgatactttaagaagttgatgatacccatgtcagaaattaagaaaaaaatcaaatgaaaaaaatccacacatttagggtattttccatttattaaattttattaattcttatttccattgtgatcagactggccagctatgttaattactttaacccttagtgctgatcaattgccagtgacctgtgaagttgagcaatagtttgtttcattgctgtagaaatgcatcattaggatggaaggtgcgtggagctctggaaaaagggactgtttaggtcccttccctcatgatgatgtgatattatgttcccattacttgaatattcattatggtttcccccatgtttttggctacctctgtttcctgcaagtgtttacattattaagttggtttggtttatagaaatgtagcttgaacctgtatatagctagagtagcttggggtgtttgcatagattggttagatttccttttcaccctagaagaatcatgggaggtttctaaaaggaggtgagacaaaaccaccgggaccgtgttacggagggatctcaaaacacagacggaaaacaccacagagctagcttgagggattctcagggggcgccaggcactaggccctccttgtgctttgactcaggtaactttcgacagaggagatagtgaaggcttcattcctttcagggtgggtggagggaggtattgcagagcatcccctgactcagaggcatgagaaattggcatgtattgacagtgccgtgagtccgggacttcctacaagggtttaggtggcatttgacaaattcatttgaaaacaggaggtaataacaagtatttattgcacaaggaatctagtggactctgatctagaaagatggagaggacatactggtcagaggatggggcctcaagtggctctcttcgcgttctacttctggacccctgagttcagtttcaagctgagatcattctctccttcctttgctctctttctttcaccagaaagcagtgtggtccagtgccaaagagctgggattctgccacaggactgtctgagtgtgaatcatagccctgctcctcaccagctctgtgaccctgagcaagtggcttcccttcggtctctcagtctcccccatttgtaaagtggggatgataatagggccatctggggttatcataaggactgagcaaaatgaatgagtgaagcacacataatagtgtctgtagtaagtgcatgttaaatgagtgaaagaagtcctgtgttttcattgttccttccacttaactagttaaaaggtaaaagggtataaaatgaatttctggtacacgtcctgatgctgttagagacactaagtatgtacttataaagagtgtggcttgggtaatcatccaacctcccgtgcctcttttttattctctgtaggaaggggaaacatacctatctcaaagggttgtaatgaagaataagcaaaataaatatttgaaaagtgctttttatgtaacacgtggttaagaaatggttgattccttccttccttttcccttcactttaaaaaaccttgtccctgacaattaaagatttctacaagttaaaacttttatctttagcctgctctcacaaatctaaaatgcagctaacttgctaatgttctgggaagtctaggtctgaaattagcaggtgatcaaagctcaatgagaggtatctaagttgctaaggtcatcactgtagcagagaagaaaggataacatacattgagtatttactgtgtgcctggtactgttctcagggattcataagaagcaaggtttttaattctcacagctttatatgacactttataccagtgtcatgcccattttacatgtaaagatactgaggcacaggttcagtaagtaaattacccaaggagatggagtcagtaaatggcagagccaggatgtgaacctagacactccagctctagaacccacagtcttaaccgccttgttgtatcacttctcaaaaacaacagctatgaagtcaacagatctatatttgcatctgtcgtgtgcccttgtacacatttcttaacctctctgagctccatgttcctcctttgtgatttaggcattaaatgcatttgtaaatgtaaaaaaaaaatgtttaatgttgttgtgaggatcaaattagataacaaacacatagcatctcatgtcgggtgaggtatgcagtaagcgttcattaaatagtagttttagatgttataatatataatttagaaactgtgacaggatccttccacacctacctctgcattttgtctactgccagctctgtaattctggcttccatgaagttgatcagttcagcctcccaggtatgggcatatgaagcagttgaagcaaaaagcctttgtcattatcctacaccgctctagaaccatcccttagaggaccacaggcagttcacccacagcccttgcttagagacgggcataacctgtaagcatggcttaaagtaaaagtaaaagtaccttaatttatacccatgaagtccatagatatttgtctgttgaaggacaagaatatggactttcttttaaagaaatgcacttatctccaaaattatgagctttagagataattatttatttattttatttgccccttgtggacataaaatgtttttgatgcaatgtattttggtagagaccttagatagtagagaaaaggcacataaacaacttatttttaaaacctcagcatcagagatgttggaataaatacaattgctgtggaaatatgtcattttagaatgaggacatttagatggtaaatgacttctgattttacacatgctggccaaaactcttcctttaatttcagacttgcatagctaaagacccactgacatctctctttggatatttcataggcatctcaaacttggcgtgtccaaaaaaataatccttggcttgtgccaaacttgtccatgcaatccattcaatcttccctatctggtaaatgaacccagaaactcagtattcttctttgatccttttctttttctcctgaactaccctggcccatgtattaatcagtgtgtcctctcattctatcactaggatacctctcaaaaacacatccacttttcttaaaactctaatgtaccattccagtcaaggctgccatcatctcttatgatctacccacaacaacctccaaactcattacattctctgcctagcacaaaagtattccttattgtaagtcctgccactgcttttcttaaagctccagtagcttcccactgaacctagaataagatccactgtcactactatagtctataccctgtgcatactatcccctgccacttcctgcaactttatctagtacctctcttctgttaaattacatgctagccacactagatcatttttttttttcaattccttgaacatcagtcttgttcatgctgcctggaatcttctttcccccactgttcgtattgatagctcagcttccgacttagcttaaggatcatctaatcagcttggcctcctctgcacgtcccatttagaaatgccctttctcccacttcagcccctccccactgtgattgcaatattattccattttcaacttggtttttaataattttataatttttagcaaattttagcaatttatttgcttttgtttgttcattgtttgcctcccacatcagaaagtaaattccagagcattgggtttaataagtgcttattttgaggggaggaccaacagcttttatcagcctttcaaagggtttcaagagctaagaaatgttactaattgatgagtttgatgatgacaataaaattgtgttttgtttattcccacaaccactcagcacaacacttcaaaaaaaaaaaaaagaaagaaagtaaattccagaagagtagggtccaggtctatgttttgtttgctaatatatatgtagatcatacagcccagatcttggcaccgggatagatactccaaaattatatgtagaataaattagtgtatacatacattaattaatatgatatgtattactatgtgtaataatatcacagtatttattaaactttcttttattgttagcaattatttgttcaacaaatttgtattgattgacagagcatgagccatggagtctaatagatagaagctctttttgtttttgagacagagtctcactctgtctcccaggctggagtgcagtggcgcaatcttggctcactgcaacctccgcctcccgggctcaagaaattctcctgcctcagcctcccgagtagctggaactaccagtgcactccaccacaccccgctaattttttgtattttagtagagacaggattttaccatgtcgcccaggctggtctcgaactcctgagctcaggcaatctgcctcccttggcttcctaaagtgctgggattacaggcatgagccaccacacccagcctgatataagctcttgtactggttctatcacttagttggataatcttagacaaattaattaaccctttaaagagcctcagttttctgatctgtaaaatgagagctataataatttcttccttatataaattgaaaagtccaatgaaataatgaaacaaaaagccatagtccacagtcatagcgaatatctaagaaagaatgcttgccattgatattttcattttatagcgaccatgaaaagcattgaaggcccattagcaaacacaattgacattattcctgcccccataggggatacaggcatctaaatagacaatttaatgctaagagctgttgaagagaatgcacaaggttatatgtgctactcaaatgaatgttcttagcatcaaggtcaaatgaattttctttgcagatattccatcaattacttaaaatcttgccatattttggatttgctacctatttggatcttgatttttccatgcactttttttcatagagtatctaattattattttttcttgtatgatgtaacttattattatatttttccaacttttcagttacagaagttacacaattaaggctttttgtcttcttagactttccttttgaaggcctctgtcctccttctccatctctgcttttattggctctccaggtctgagctgtcatcctgggaccttctttccctatgctccttagcaggtccttattgtgtatcaaaatttttttctttctttctttctttctttcctttctttctttctttctttctttctttctttctttctttctttctttctttctttctttctttctttctctttctctctttctttctttctttcttgtccattggcttctatattttactgcagtcatactcaagaaacttatttcagtacacttacttagtctttgagagtttgcaaataacttcatatttgattaatcatttaactggccataccattctaggtttaacagtatgtcccttgagaaagttgaaaggtggacatggatgctcctgtattcttagctacttgggaggctgaggtaggacgatgaggccaggagtttgagaccagcctgggcaacatagccagtccccatctctagatttttttttaaattagcctgctgtggtggtacactcctgaagtcctacctacttttgaagctaaagtgacaagatcccgtgagcccaggagctcgaggccgcagtgagctatgatagtgcctttgcactccagcctggcagacagcacgaaaccctgtgtcttaaaaaaaacaaaaagttgaaaacaagctctacttgtagtttttagtagacactagtgaggagtttggtgcagtctaattttattctttaaaaaaaaaaaaaagactagtttccaccctcctgtcctagtgcttaggtcttgaattgttcacccctcctccatttccaggaagtttctcagatatttttaatgctgatattctgaaattttatgtgatgtcaagatgtaaatcttttttccatctatactgttggattctcagttgactcttttaatctgaaaaaatgctctcttctctattcctcatattctttgttgaaaaatttctcctcaaaaaaaaaaaagaaaagaaaagaaaagaaaaatttatcctcttctactctttttgcctcttttttcctggggttcttgtctgctttatgagaactcttagcttctttctcacattttttagacaagctatatttttgtccctaaatccttgggagcatcttttactttattttctaaattcctaattttaacaataatactggaaaatgtaagtgctaaatcttgtttaaattgcattttttttttgcatagcattctgttcttgttctgttttgagttatcttcattgtttccacttttaacatcttttatttggttctcatatttctagtcatccctggttgatcaatcttttatagaaaaaagatctggatgcctggcattgatttttctttgttgttgaggatgttttccacttttactggatctactctgaatgagaatgcttggaagtgtgggtcaaggtagtttcactgacagtctttacgacatggattcagagccatagacaggctatgggcccctcaaatgttggagtatcgagggctttgcactggggcacaaaaatccatattaaaaatttttaactttccctttatagctttcttgagcttctttttaaagaaatggttgatgctagctaaatgctagctgcttgtactctacttttacaaagcttgtttaaatgttattgcagatccaaactggacccttgttctatattcagacattcaatccttcttcttagtcctatttctagtccctgttctgtgtctctcataatcactgactttaagatcaaaggctcttgggaggcaaaacagaccaactggcatccgcttgctcttattctccttctacaatattttaggcttcagctttctctatctcttttatccatcaacatgatctcatccatgtgggctgtaaatttgttggaaatatcccattcattagtgatgatcccttccattcttttcattcatatgaagtttttttgtttaatttttatacttttatttcagtggggtttcaggagagtgtgaaggcaatatatatactcaaagccaaaagttaaattataacttgaaattactgtacaatttccctataatttatttaaccagtgcccaacttttggataaatctttctaatatttttcagcatgataactatttgacctttttatctggaagagagaggttgaagataggtgtgcaggacagtacatgaaataatgagaagctgaacacctagtcctaacagaggtaacccttggaagcaatgagcagacagaaaatttaagttaaaccaaagttgggatcccatgcaaagaatttttatgggctgtaggttagaatgccatgtaggaagtcaagagctcttaacagtattgagcagacttaaaaatctatatggatctttgcctatgaaaattgtgaacattcctaattatgtccataggaaaaaatttttaaagtgggatttctccatccaagtatgcgaacacttaaaagtcttgatatttagttgacaaatttttcctccagaaggattgcaccaatttacactcctatcagccaccaacctcttaaaatcaaacaaaattcccacattatttgctaattttataagcgaaattttatcttgttatttttacatacatttcttagattattactaatattgattgatatctatataatattactcagtgcccaaaccacccttcaataggtattgctgacttcgttttagaaatgtgtagactgaggctctgagaccttaagagttctgaagttcacacagcttgtacgtatttaaaaacagatgggaacatagatgttagtttgccaaaaaatttaagaacatgtgacttaccttgctcataattttttagatgaaagatcagattagtcattttctttggaccttcgatataaataattctgtcattttctactttttgaaacaaatgtgttttttgagccctttgttttcttcatgcaaaccttattcagagagggatgtccctgctattattattattgcacagggttgcaagaacagatttcaaatggctcatgggaatttagctttctctgagatcttgacatcactttatttgtcccgttgcagtctatgtcttcatcctagcaagtgtgaaaaagttgccaggtaataccattttaccaacctaaattcttgaagatattttatgcaaaaggttaaatactcttcattctaaactggtagcatagtcttcagtgtagatctggaagctaccagaaaagtatggcatacagtgggaggaacacaagttgaactgccctttagtttggctggacctgaagaattccctcattcgatcactgtgtggaggttaaaagtccaggcgcttagtactgatatgcacaatatggatgaatctcaaaaatattatgttaagtgaaagaagccagacacaaaaagtcacaaattatatatgatgctatttataaggagtagccagaatagataaatccatagggacaaaaagtagattaatggttgcctggatttgggaggaatgaggagaagctgcttgatcactttaaaatggttaattttatgttatgttaagttttatctcaataaattattattattttttaatccaagttgttgaacccaacagacgtgaaattggaatctaactctatcattttctagctgtgtgaatttgggcaagttattttaatttcctaaccttaatcctaactttaacatttaaacctccatttccttcaatgtcctaatctggaaataaagatgactgacagtctacccaaacgacaggaccgttgtgagaactgtatgcaatgttgtattaatacataaagcctttggtgcagtggttgacgcatcacaagttcttaagaaatggtagctgggccagcctgaccaacgtggagaaaccccgtctctactaaaaatacaaaattagccgggcatggtggtgcatgcctgtaatcccagctactggggaggctgaggcaggagaattccttgaatctgggaggcggaggttgtggtgagccaagatcatgccattgcactccagcctgggcaacaagagcaaaattccatctcaaaaaaaaaaaaaaaaaaaaaaaaaagaaaagaaatggtagctggactatgatagctattactactactgtcttgcttcaggtaattcaagtggagtaaagtcacatgacattgacttcaggaggcatatattgcttcaagcagttcttcttttgatagacgggttttagattaaaactgtttttaattaatatcaaaatggaacagagttggagagagcaatgagtaagggtcagatgcctaaaccatcacattattgtcattcttgggagagctgtggaccctgcctcccagtgtctgctatagttgatttctctcttactgaaaagggacaaacccttgaaaaggtagtcatgcactggggcatttaaaagaaaatgtgagaagaaaacgatgaatgtcactaagcttcagagaaggaaaaactgtaggcatcagttgaaagttgtccctctgtagtggattagatgtgttacacaaaggtgcagcttgacggtgttaggagacccaagtcctccatctctgtcaacagtggcaagtgcaaaagtacttttattaatggaattctccaaagagctcaaagctcgtttgctgctttactgatgggcattcttttacccactcatgctttggttttatttgttcttcctatgggctcctcaaatcaagagaaagccagaaaaaaaaattgagataggaatatcctgttttatcaagtcttcttgtgactactatatcatttgttctcctgaagcctaatcaaatgagacataaaggacagccaacataaataccacttactgaatgtgataacaaaggtaaaattagttgaaacaacatgttccccagtgtccagcctctccgtggaagagtgagaagtcagaagtggctgctgatgttatggaaagttcatggcctttaatgggagacagttccagcggacacagattttcatccaggccctatgattagctatgtggccttgagcaaaactttaggttttaggggttttcatgtcctcatgggaagaatggggatagtaaaatctatttccaacagttcttaaaagcattgctcaactctgtttagaggaactttgtgcccggcaccccttttccccttacactataagcttcaagagagatgttgtggcagcttttgtaatcatagtaaccaacaagttttgtgcattagcatgggttagggaatgcttacttagtgctttctgtctatgatctcaattaaatccttacctgaagtctgtatagtaaacattatcacatccagattatggtgtgaagttcagcaattcatccaagatggctctgctagagagcataagagcggagagcaaagcctaagtctctctgacagtgaagcctgcacacataacttcttctaccaccaaaagccttgaaccagggtctagctgaggtttcggtgatctgcagtcagttgaactaaaccttggaactacacagtagacattgagtagtcagctgctgggttgctttcacctgggatcaaatttccagcttcagagagacactacgtttctgtggtcactgttctttcctacctagagttcactcagttgagtgccctacctctgagtcttcatgacgggaacaccagcttccaaataggcccggcacaaattagcttcatccatgcagccccactgcatggtgatgagcgagtcagatgagcactgcacatttggatgaacctgagtcaagaaaagccacatgtgaaaacacgtttatttccaaaacgttgatgcatctggaagggtgtaactggcactcattgatatttttggcattcatggaaaacaccccaggctgcttaggtaattaatttcgtagggttagtcattaacaggcttcctgctttccttctcctttggcaggcccagctgtgagatacagtaagttcaagatgtcagaggccaggccgcccccgctgctcgggcagcacacaacgcacatcctgaaggaggtcctgagatacgatgacagggccatcggggagctgctcagcgctggagtggtggaccaacatgaaactcactgacaaaggaaaagggctcttcctcataacctcgatccgaatacactggcaaaggcaacactttgcttggacccttctccccagttctgataccactaaaaagaagatttagagtaactccagatttcttacatggcatctccagaatggctctggtattaatgaatctagtgccttttaaatgtatcccacgttttgttccctaccatcttttttttcagatgatgatttcattatggatttgtgggatttttaaaaataaagttttaatttttttcctggaaaaatgcactccttattctacttacattaatgtcctaaacgtttgccccttaccccccatgccctcaccagaccccccgccccgtccatacaggcctgaaaaagagcagctctcttgatactttctacttgtacataaaatctgcatttaaatttgtgttagggagtcaaagcaataagcagaatgacagtctctgtgattgattttatacagaataacttaattctgagctcttgaaccctttgttagtctctaatttaaaccatagactttgcggatgtccattataaaactgagctccattctcccctgtgggggtaaatatttgctttatgttgtatttctctggtgattttatgctatgtggcagaaagtcaatattcccagtgcatttagagatgtaggtatctgtctgcacaggtaggtgagaagtggttttacacttggtaccttattttgagccaagtgaaaatgcaacagggtttttaaatgaattaaacaggttcttaaatgactatccaggtgttaaataatttatacatcatgacagataaaagaatgacaggaagacattgctttgtaatctgagcatccactgttgaagactagatcatgccttagcattgagtatttcaatggatataaagtataaaaaacacctgtgtccagtaggtgagaaatgattaggacgtatgttccaggataaattgttgctcaagactgctaagcccaggtatagtctggggaatcagatgacctcaactcctggctgttaggcacatctattttaatgtcattacacaccaaatggtaattgaaagctgaattacagatgttcatctttcaaactgtgatttaaaactcattttcttttcatattcttctttattagaatgatttgagtcattaatctatgctgtaaggcctaagatgtttctagaatgaagaattccaaacaaataggaacttgtcttctcacaaggtcttgtgacacttttccaaagaatgtttactaatttttgaaacagttattgtcttctctgctttgctttttgtggacatcttattctgaagaactcttgctgttattctactagttagaatcacatcatacaagggtaattggatgccttctgcagtacttttcccccattggctaattcacaatgcatactcagagacatttactttaggccaggtagtgaaatatttctttatgcttgtacatttaatatgaaaaatggtaaaagattagatggcagagaattggcaaaaccacatatcttgaaagataggcccgaccatttcttccgctgatctgggtagatatcttgaaatgcaaatttactcacttactgggcagaccctaaatatctggctaaacatacgtaggatgatattgatcatgcaaagaggacagaaaattcctctaaaattttcaaaattcccctaaaattttcaaatccatgtacagctcagtcttcagacatgacacagtcaatattaaaacaaaaagactgtctctagtgaaatcatatatgtaagtgtctaggactccacctacgcaagtcaaaatgatccaggattttgaacctactggtcacccaacagaaagcatttactgtgctctgctgatttagtggaagaaataatttggaatatatttcaagttcagatgaataattagtcctgaaagaaacatcatgcttgctaaaatttctaacaatatgccccagatcaagttatgcttataaacaaatgtgctgttttaattatcggggcctattatcttacacattcctgaaacagagcacactactaatataccatatgctcaagttcagtttgtgtcaaggcctgccttctggcaggtttgtgtctaaggttggcttagaaaattttctgaaactcagtggggtaatcgttacagaattggaagtgtgtccgtaagcaaatgggcttctttttcttgttttttttttttttttattctgaaactttttactgccatgattttctgactaatcaagcatgatattttccagaaagcagtctgatatgctgaatgcttctctagcagaagagaaatgaatattgatcaactttgtgtgactacccaattacttggtgtgagcgtgtgtttgatccatctcctaggggttagaagtataatcatgatttaaggaaacaaagagggggtcaggcacggtggctcatgcctgtaatcccagcactttgggaggctgaggcacctggatcgcttgaagtcagcaatttgagaccagcctggccaacatggtgaaaccccgtctctactaaaaatacaaaaattagccaggcgtggtgggtgcctgccttcccagctacttgggcggctgaggcaggagaatcacttgaacctcctgcaaaggttgcagtgagctgagatagcaccactgcactctagcctgggtgacagagcgagactccatctcaaaacaaagaggattttatacaggctagttcataccaggacattaggctggatagcaccacaaggcagggctttggcatgaagacttcacaactcctgcccttgggaagcttgtaccttctcatatctcacctgagtttgctatttcaccactgactcttttgtgccatgggtttgtcatgttgtattttaaaggctttatagatatgaaactttcaggtcccacgtggctcaatgtttcattcatacgtaggattcatactccagataatggacctaaagagtctgagagtgaaggccaggtccaggctagacagactatgcagatcttcagccccttctcataactgctcaccattgactctcaattggcaaaggagatgagtgggaaaaatgcacaccgttgccctccataccctaaccctgggctattcattttcaaacccattgcccaagattatgatagtctccttgcatttgcttctgttcataggagactccctgatgtagtgagcccttctaattgatggaattcttgaggtacaacgggcctgaaaaaaaacagttgcttatcttgattacagtatgagtgatctttaggaggtaggatgtcaatctcactcctcttcctgcttgatctagtggtactagtactggtgcatgtgtttgataaggaagatgaagagatgcagaaaaaagatgcatatttccatttcaaacagcagttagggaaaattaaaaacccatcacagaggctcttatattgcagtctaaaagttttctcaggcatgaagtacaattgcgtttcttactatcccagtatagcaaaactagggttaaatgtttcatgaattactgctttcatgagatgcttagtttctccatacagacacaccatgccattttctgagcatgaatggccctgaaagttcctttcaacatctcagttgcctgggctctgttgtccagactggagtgcagtggtgcgatctcagctcactgcaacctttgcctcccaggttcaagtgattcttatgcctcaacctcccaagtagctgggactacaggtgtgcaccaccactgcccagctaattttgtattttaagacagggtttcaccatgttggccaggctggtctcgaactcctgacctcaattgatccgcccacctcagcctcccaaagtgctaggattacagacatgagccaccatgcccggaatgaccctgaacttttaaacaaggtgggcagtatgcaggacaggcttatgtggtgggtttaggggagcagaagcaactccactagacatctttaccccaacatccactcaaaaatatgtcttctggtgtcactttaggaggttaaagtattataggcaaatgaatgcaaatacttgcactactacatttattccacacactagggaaaacaagtacaaaaaaggagagatttggaggaatgggaactggaataggcaaatttgattagggggaaagggaaagagagagcacacccaggagctgcagatccaaggacacatttccttggaagactctggaagccacaggcagaatgaacccagcctgacgtgttggtgccgagagggaggggcaggcactagaaagagctcaaacactagccagatatcagaatttactcacctcgatttttcatgtgaagcagctcctttttctcatttattaagaccttagggttaaaagtgcaggacaggaaactctctcctttgcaacatgaacaattgctgcctccccgctcttccattttcacctctttctctctttgtcctgattactcccgttcttacctgtcttttttctcagcctttgaacctcttcccctctctctccttctctggggtaaaaatctttttcctcctgtccttttatcttccaaccccccctcctcctctcttttctcctttcttcatctcctcatcctttctctctctctccacacacagacacgcacacagagttatagatccatgttatacaactgtggataccaaaacctgtgtccgaccttcagaaaaataggactttctcagtctttaggaagataactagtggtaattctcactatgacttcacccccacaagcagtcttgaattaatctctgggtggggtggctctttaataactagctgccacttcttgtcccttgaaacacagggaaagaaatgaaagggtactccaaatgctactctgggctgtggcagagttctcaggctctctggctgtatgtcacatgcacccagttctaagggggaaaacctaaagtaaataaaatagaatgcagagcagagtctagactcttcgttccaggcccagacactttgttctggccccagacgctggagccgaacagcttgggtcttgctgttgtggttacagaggaagttccattagggcaggagcagggagagcatgacagtgtgatcggggactgttctgctccagcgtcaggctgggtcttggactttgcttcttactctttcttagcaaaggaaaatttacttggccttcaggtggcggtgaatagtttgtccctggccattttaatccaatggcctccagaaggatggtgccctcacctctaccttgttaaatagggtgattccattctcatgttccctttgctttcttctcccagcaggctgaaaacactttgccacatcgctccccatgcctcctccctttctctttctttgcagattaaccacatgacagtcctttcaactccagttagtttctttggctcctgaccacatagattgggggaacagtgttttcctgctttgcgtcctgtcactcacaccccttcctctcccctagaactttgcacgagtactcaccataaaacaggagactcagcttcagaagacgcaactgggatactgaaagaaaagaaattaatgtcaaactgtcacaggaaaatacctttctttccacccctcttacctctttgtgaacccactagaatttggatctccatagcatctcttggtatgagatgtggcaacacgcataacacacattcaccctgacggtcctggatttatgtttttagattttacaaaaaacttccagctgttcctgatggaagctttgaaatgtactcctgatgaacattattgtgttctttccttggagagggtcaggaaaattatagcttccattttgggaggacagttaaagaatcactatctctagaggtagaaaaatgaactcccttttcctatctaggattgcctcttcatatagccgaacgtgcttgcaatggcattgacacaggccacagggaaggacagaaatgcagcaactccacaagtgcagtgggagaagtctgagactacagcagactgaagcccccattctcagaaacacgacagagccgaagtagccagtgacttgggctcccacctccaagcccacgtttcccatatgctgagtcccaaacgttttgtctcattctctagctttactttctgcagtctgggaaaactccagtgaaaggatgtaagcccagcatgcaggccagaggtggtgctcaagacttgctaagtgaatcgttagctgaactcactgacaaaccacggagagatgacaacgatccaaactcgatgttttatgcaactactctcatacaacctgggtgacatgaggtgaaatgagtagcttggtgggtctctgtgtgggcgcttttctgggggaaggtttattagctcggcaaaaaaagctctcagatctagaataggcccagatggggggagaaagaggactctgacagttgtcagagttgttacctttaatttcctgaacaaagtggaagtagatttacaagacgcatccatgtaaaataagaactccttatatatatataataagattaatatataaaataagattaatatatataagaactctccccatatatatatttatgtctctataccacatgcccccatatatatgtctctatctctccgcatataatatatgatatatatattataagcttataagaacatctcataagctcataaaacattttcaaatattggagcatatatatatatgtgtatatatatgctctccatatatatggggagagagcaagagagagagagagcatctcttataagcttataaatgatagcttaccaaaaattctgaaaaacgttagaacatgagtgaaacctatttccagttaaatttcagattcttggacaaataaaaagaagtatgagagatgtctagaattatatgtataactccagtaggagttttaaaaattgtattagtaggaaaacatgcatttatatgaaaacctactctataagcaaattaaacaaaaaaagtagtcccacaaaatgagaagatacagcagtgaactgaatagataacttcttttagttttggtttgttggaacattttcaaatattggagcagaagcaagaaagaagtacatcttcatgtttgtctattaagccatgaatgaagcactttctaatcggcacaattagaagtgttcgctgcatgttgtttgctgtcttagtcccctgtgcttatctgaccaaaacagctgtcacacattgagctatcattacctggttactggtggttctcttctattaaactataatataattgtgggtatcgtagtcactattgtatctccagttgttatcatagcgcctactctataggagatacataacaaatatctgctgaatagacatcctctcacccaccagattacaagttctatgagacagaaactggtcatatttattttactactcatagtgtctgtaatagccttcaaggatagtcaccatctattcctccctccctatatgcacgtgcctccttcttgcaagagatgcattttatttctcctccccttgacactgagctagtctttttttctttatttcttctaaaaaacaaaacaaaaatacgggatacatgtgcagaacatgcaggtttgttacataggtatacatgtgccatgttggtttgctgcacctagtgacctgtcctcttaagttacctcccctcacccctcaccccacaacaggccctggtgtgtgttgttcccttctctgtgtccatgtgttcttattgttcaactcccacttatgagtgagaacatgcggtgtttggttttctgttcctgtgtttgttgaggatgatggcttccagcttcatccatgtccctgcaaatgacatgatctcattcatttttatggctgcatagtattccatgacaccaagatagccttgtgacttgctttgtttttgtttaagaggtgagcgcttgctctgtcatccaggctggagtgcagtggcacaataatagcacattgcagtctcaaactcctgggctcaagcgatctcccatctcagcttcctgagtagttgggactacaggcatgcaccaccatgcacagctaatttttaaattttttatagaggtgggggtctcactatgttggccaggccagtctcaaaattcctggcctcaagtgattctctcacctcagcctcccaaagtgctcggattacaggtgtgagccactgagcctggctatgggctatgacttgctttttaaaaaatctttttactttaaataattttagatttacaaaaaatgccaaaaatagtacatagaattcccatgtacattcacccagtttctactaatgttaacattttatataaccaatgtaacattatgtaaactggaaaattagcattgatataatcctattagctaatctataaacattattcaaattttactgattgtctcacttgggtaggcagaattctaagatggtccccaagattcccagccacacacactgtctctcagttatccaatcaaacactaagtaagtgcttctatggaaggaatttgtagatgtaatgaaggtccaaaatcagttgatcttagtatagagagactctctaggtgggactgaactaatcacatgagtcctttaaacctgggtctagaggtcaaactcattaggcttcagatttgaagcacaaaggggatttgacatgtggaagtagtcacatggcaaggaatgcaggtggcctctaggaggtgagagaaaacccaagtgacagccagcaacaaaacagggacctcagtcctacaaccacaaggagctgaattctgccaacaacctgaatcagtttggaagtggatccatttccagagcttcagaaaagaactcagccaagccagcttgatttcagtcttgtgataccctgagtagagatataccatgcttgaattctgacttaaggagctgaaagcttataaatggctgttgttttaagcctctaagctaggagtaatttgctatgcagtgacagaaaatgaatatacccacgaatgtcattttttttttctcatccaggatcaattccaggattccacatcacatttagttgtcattttttcttagtctcctccaatctgggtcagtctccaatctttctttgtttaattaccttcagtgtattgtgcagttattttgtagaatgtccattaatttggttttgtgtgaaatgcttcattattagatcaggattatgcatttttggcaagaaatttcagaggtgattttggatctttgcagtatatcgtaacaggatgtacatgatgttgatattgtattactggtcattttaactttgatcctttagttaaggcggcatcttacaagttccccttaaaagtcctgggtttgcttttgtttgtttctgtaatcagtaagtatattttggggaaatattctgagactgtactagttcacttcagcaactgtaacaaattaccacactcatgatcatgtaaaacaatagaacttaattctctcaaaattctagaggccagaagtctttggatttcattctgatcaatgtcattgaactgaaagaaaagtgttacatggctgtgctctctgtgggggctttagaaatgaattcccttcctcacatagtccagcatctcaagctgcattcctttcattccttggccaatggtcatttcttcaccttcacagacagtggtgtaacatcttctctctctcagtctgctttcttcctcctcctttacatgatcttctgtgtgccatcaaatctccttctgcctgtctcttgtaagcaaacttgtggctctattcagggcccacccacacagtccaaaataactcctccatctcaagatctttcatttaatcacatccataaagtctttcccatgtaagataacatttacagatttcagggattagatagaatgcattatcttttgaggaggcattttctaggataccatagaaaatatgcaaatattctgtttttcattatagttttgcccacgaattttagcatctgtctgtgattcttgccttaaacaattatttggtattctacttctatttttcctgtttttagatttattaactgtaattctattgtaa

SEQ ID NO: 1572 - DNA, 867 bp, Homo sapiens
atggggaaatactatgggagttggcagctagaaacacaagttaggaaaggaaagagtgggaaattcagagaaagtgaagaatcacctaagctctgcaatgacagtggtcaagctgctacttcaaaatccatgcctggattcttatgtggaatgtgccctctgtctacctgcatttctttagagcttaaatccaaacattgcctgttcggtgaaggctctgaaataaaaataaaagagcactttcaccttctcctcattgcttacgcctgctgtggcctcagaggagcaatagccttcatgggccacccagaagttggatataagaaaacagctctaaacccatcacgggaaggggagtactcaggtgagtgggtgcaggaaccagggcaaatcaacactggaaccagccagttgctcctctctggcccagctgtgagatacagtaagttcaagatgtcagaggccaggccgcccccgctgctcgggcagcacacaacgcacatcctgaaggaggtcctgagatacgatgacagggccatcggggagctgctcagcgctggagtggtggaccaacatgaaactcactgacaaaggaaaagggctcttcctcataacctcgatccgaatacactggcaaaggcaacactttgcttggacccttctccccagttctgataccactaaaaagaagatttagagtaactccagatttcttacatggcatctccagaatggctctggtattaatgaatctagtgccttttaaatgtatcccacgttttgttccctaccatcttttttttcagatgatgatttcattatggatttgtgggatttttaaaaataaagttttaatttttttcctgg

SEQ ID NO: 1573 - protein, 195 aa, Homo sapiens [sequence omitted]

SEQ ID NO: 1574 - DNA, 1120 bp, Homo sapiens
agttcgccgcttgcaccgggaccgatgccatctgagacgcacgcgatgctggcgacgctggcgagggtggcagctctgcgcagaacctgcctcttctccggccggggcggcgggagggggctgtggactggccgcccgcagtcagatatgaacaatataaagccattggaaggggtaaaaattctggatctaacaagagtcctggcgggaccttttgctactatgaatttaggagatcttggagcagaagttataaaagtggagagaccaggagctggtgatgatacacgaacttgggggccaccttttgttgggacagaaagtacatattatctcagtgttaaccgaaataaaaaaagtattgctgttaatatcaaggatccaaaaggggtgaaaatcatcaaagagcttgcagctgtttgtgatgtgtttgtggaaaactatgtccctggcaaactgtctgcaatgggcctgggatatgaagatatagacgagattgctcctcacatcatctattgttccatcacagggtatggtcagacaggtccaatttctcagcgagctggttatgatgctgttgcctcggctgtttctggtctgatgcacatcacagggcctgagaatggagatccagttcgcccaggagtagctatgactgatcttgccactggcctgtatgcatatggagctattatggctggattgatacaaaaatacaaaactgggaaaggactgttcattgattgtaacctactgtcatcccaggtggcgtgtttgtctcacatagctgcaaattatcttattggtcaaaaggaagcaaaacgttggggtacagctcatggcagtatcgttccttaccagatgaggaagagagtttgttacttccctgaggaaacacagcctgtaagcggatgagttggaatcggatgcaagtttggaaggaagtatcctctccccaaatgtggggcagagagacgcctgggctgacctaattgttaaagcctcagtcagtgttatgctgaatttgtcgcttacatgtctgcacattactttcaattgaaagtagaaaaatgaaatagagatctaataaacattaccacaatgttaagactgaaaaaat

SEQ ID NO: 1575 - protein, 294 aa, Homo sapiens
MPSETHAMLATLARVAALRRTCLFSGRGGGRGLWTGRPQSDMNNIKPLEGVKILDLTRVLAGPFATMNLGDLGAEVIKVERPGAGDDTRTWGPPFVGTESTYYLSVNRNKKSIAVNIKDPKGVKIIKELAAVCDVFVENYVPGKLSAMGLGYEDIDEIAPHIIYCSITGYGQTGPISQRAGYDAVASAVSGLMHITGPENGDPVRPGVAMTDLATGAYGAIMAGLIQKYKTGKGLFIDCNLLSSQVACLSHIAANYLIGQKEAKRWGTAHGSIVPYQMRKRVCYFPEETQPVSG

SEQ ID NO: 1576 - DNA, 1608 bp, Homo sapiens
agttcgccgcttgcaccgggaccgatgccatctgagacgcacgcgatgctggcgacgctggcgagggtggcagctctgcgcagaacctgcctcttctccggccggggcggcgggagggggctgtggactggccgcccgcagtcagatatgaacaatataaagccattggaaggggtaaaaattctggatctaacaagagtcctggcgggaccttttgctactatgaatttaggagatcttggagcagaagttataaaagtggagagaccaggagctggtgatgatacacgaacttgggggccaccttttgttgggacagaaagtacatattatctcagtgttaaccgaaataaaaaaagtattgctgttaatatcaaggatccaaaaggggtgaaaatcatctattgttccatcacagggtatggtcagacaggtccaatttctcagcgagctggttatgatgctgttgcctcggctgtttctggtctgatgcacatcacagggcctgagaatggagatccagttcgcccaggagtagctatgactgatcttgccactggcctgtatgcatatggagctattatggctggattgatacaaaaatacaaaactgggaaaggactgttcattgattgtaacctactgtcatcccaggtggcgtgtttgtctcacatagctgcaaattatcttattggtcaaaaggaagcaaaacgttggggtacagctcatggcagtatcgttccttaccaggcttttaaaaccaaggatggctatattgtagttggagcaggaaataaccagcagtttgccaccgtctgcaagatcttggatttgcctgagttgattgataattccaagtataaaactaaccaccttcgggtacacaatagaaaagagcttattaaaatattatctgaacggtttgaagaagaactgaccagcaagtggttatatctttttgaaggcagtggagtcccgtatggcccaatcaacaacatgaagaatgtatttgcagaacctcagaacgctgtctctggcttccaaagcctgctgcattccttggcccatggccccttccttcatcttcaaggatcagcaagggtattacacaatggcctcgttatggagatggagcatccaactgtggggaagatttccgtcccaggcccagctgtgagatacagtaagttcaagatgtcagaggccaggccgcccccgctgctcgggcagcacacaacgcacatcctgaaggaggtcctgagatacgatgacagggccatcggggagctgctcagcgctggagtggtggaccaacatgaaactcactgacaaaggaaaagggctcttcctcataacctcgatccgaatacactggcaaaggcaacactttgcttggacccttctccccagttctgataccactaaaaagaagatttagagtaactccagatttcttacatggcatctccagaatggctctggtattaatgaatctagtgccttttaaatgtatcccacgttttgttccctaccatcttttttttcagatgatgatttcattatggatttgtgggatttttaaaaataaagttttaatttttttcctgg

SEQ ID NO: 1577 - protein, 430 aa, Homo sapiens
MPSETHAMLATLARVAALRRTCLFSGRGGGRGLWTGRPQSDMNNIKPLEGVKILDLTRVLAGPFATMNLGDLGAEVIKVERPGAGDDTRTWGPPFVGTESTYYLSVNRNKKSIAVNIKDPKGVKIIYCSITGYGQTGPISQRAGYDAVASAVSGLMHITGPENGDPVRPGVAMTDLATGAYGAIMAGLIQKYKTGKGLFIDCNLLSSQVACLSHIAANYLIGQKEAKRWGTAHGSIVPYQAFKTKDGYIVVGAGNNQQFATVCKILDLPELIDNSKYKTNHLRVHNRKELIKILSFEEELTSKWLYLFEGSGVPYGPINNMKNVFAEPQNAVSGFQSLLHSLAHGPFLHLQGSARVLHNGLVMEMEHPTVGKISVPGPAVRYSKFKMSEARPPPLLGQHTTHILKEVLRYDDRAIGELLSAGVVDQHETH

SEQ ID NO: 1578 - DNA, 536065 bp, Mus musculus
  misc_feature (1)...(536065): n = A,T,C or G
aagctccctctaacccctcctatgtttgggttctgaacacagaaagaagggtaaaggtttgggtaacagtgggcagagtcactgaagtctgggaaagtcctctaaagagctctttatctgcacacaatgcagttctaagattgtgaagtcacttgttttccttctaatcgtgtgcttccagcttgttttctcttattaacctgagactgagagtatcctacggaatagctcctgagcccactcccctaaccactggaaaggtccctgaagctgctccatttgcacagggtcaagacccttcccaggcagacttcctcagaatgtaactggaggcctgcacttagagtcggtttcctcctacacagtagaccttatttctactaaaataatgatgaaccacaggctgtaagagtccagggatactagcattttccttctcctataggcaaaggctgttatgtggaaagaggatgatggttcttcattgaagtctgctcatgctgtgttcattagctatcagctgctttaggtgttaccaatagcaaaggtcacattgaaagtgtgtttctgtgctaaaccctgttctaggacttctatattaactaattcctttagtcttcactcatttgtcccagtttatactcattttcatgccatgagttcagtgattttataaggaaacacagtgagtaaatgtcaaagctgtgatttataccccaaagcagagacaggtccattatctatcagatcacactgtccactctactggccacaagtgtatcccaataaagcacatggtgtctttaggaatgaaacaggaaaatgaggcttagagattgcatgaataagaaagttattaaccactacatgaaccaaaaaactcacaaatattgtttctcaccactgtgcagagtgctacaagagcaacttaataagtatcttacagcatcctgttattatctagtttgtgtatacagggagacagatgcttgattgaatccaaagtgatttaaggatgccagaagagcaagttggttccaaagaccaagtctacaagaacagagagccccccagcagctcggcagacagtttctagtcctctccttgcagttgcatcaatgaggatatgaatttgggtagtgggggaaagttcaggctgtgtcctagttttcttccctttgctgtgataaaacactgattaaaagcaactttgaagagggaagggtttatttggtttacaggttaatccatcacggagggacgccaacacgggaaacccaattaaggtgatactgtctagaccaggttgggggctaccatatcaatgccatacagacatgccttcagacctttgtgatggaggcaattcctcaaatgagtttccctcttcccaagtctctctactttttgtcaaattaacagaaactagccagcataggatgcactgtgtttgttataggttaactaaagtgaaaacggcttggagctacttctcatgagaagtcagaataataaattgcttaatgttgtgaaaatgtttatgtagtttgaggggctacagtaaaacatctgaaataccatctcctagagaaaagataggactcactctctgtttcctgcaaagagcaaagctggagatctgggtcacatggcagtgtgtttatctcattgatggttgctagtgcctggggcgataatatcctctcatacatactgagtgttcacaatgttcactgaagttaatgtccccctgtgtgtcttaactagacgttgtagatcaaattcaccattaccggcactccataccattgcatccatagagaagcttcctctcattgagtgtttattaagtagcgtcatatggagtgccattacttttttgtggatgaggaaatagagaacttcagttactttcctagaatgacccttctctaaatcaataacttataaccatctgggcacagttagcctacttcttacggagtttgcttgtaataataagggttacgatgatgactgttcattagaaatataatgttagtcactaatgacagccacatgaaccgtttgcattttctagtagctatagtaaattgtaggaaaaaaaggagcctgtgaaagaccagcttagctctttcccttggaccttctcttcttcccttctaaccatctccattttttgtgacagttgctaatacccagaaacagtttctaccaagaacggtcaagggccacaccaggctgggacttgggtaagtgatgttcactgttcttcctatcttccatgatggtctctccagtcctacctacagcaggctgcttgaagtgccccaatcccattcactggagatgctaatacttggtacagacctaggagcctcctgccccttcatgcctgtctctccagacatattctttgtcctaccattgcctacattcaagagctactcctcccaccacaccttcgctcccaggggactacatcatggtgtggcctggatcccctttgctcttttccacattccttctcaaacgttagttctagcccatctctatttctctctgccacctgctaaaatgtggaagtattctactatggatgtcagtgataccacactgactaaaatcctgggaagattggaacactcaaccaacaagaacaacaccaggtatcacctagaaaaatctcaatcaccataattccagatgcctagacaacaacacaaaaatataaacatgaacaaccagtacattgtgcctccacaggaaacccataaccttaccaaagaaggccctgaaaaaacagaatgtattcaaggaccttaaacagaataagaataaatcactcaatgaagactgtaaaaatagtataaactgtcttagtttgggtcttgttcctgtcaagagatgccatgactatgccaattcttaaaaaggagaacatttaatttgggctggctgacactttcagaggtttcgttcattatcatcattgtggggagcatggcaacatggaggcagacatgggtactggagaagaagatgagagttgtacatcttgatgtgaaggcagcagaaggagactatatgccacactgggcatagcctcaaagacaacatccacaatgacaaacttccttcaacaaagttacgcttcctaatagtgccactccctatagccaagcattcaaattcatgaatctatggtgacatacctactcaaaccaccagacaaacagttgaatgaaataatgaaagcaattcaagacataaaactaaacttaaaaagataaatgtaaccactaaagaaagtcaaaactggaaataaaaagtttaggatatacaataaaaaacttcagtggtaaacctcacttacacattacaaaccatcgaagagagagtctccagtgttgagaaaaaagtataataaatggataactcagtcaaagaaaatgttaaatccgaacaaacaaacaacaacaaaacaggcccaaagggtccagaaactctagaacactatgaagagacaaaaatctacaaatagtagggataggaaaaggagaagaaatttaggtcacaggcacagaaaatatttgcaacaaaataatttaagaaaatttccagccgggtgtggtggcgcacacctttaatcccagcactcgggaggcagaggcaggtggatttctgagttcgaggccagcctggtctacaaagtgagtttcaggacagccagggctacacagagaaaccctgtctctaaaaaacaaaacaaaacaaaacaaaagaaaaagaaaagaaaagaaaatttccccacctgaaagaaggaggtgcttattttgggacaaggagcttatataataacaaattgactagatcagaaaagaaatccctcagagtatataataactaaattactaattgtatagaacaggttaaggacattaaaagctgtaaggaaaaaaaagatcaagtcttataaaggaatgcccattagaataacacctgacttgtcattggagactcagaaccatccagaaggtcctggacaaatgttccaccaacttggagagattacagatgccactactctattcagtaaaactatcaatgataaacaatggagaaagaaaaatattctacaataaagcacaatgaaaaagaaatggctatctacaaatccatctctatagaaggcactggaagaaaaactacagcctgaagagattaaccacaccaaaaaagagataaagaataaataattccagagcagtaaattaaagggagaagaacctacactataacaacagaataacagtaatcaataaacacttgtcatttaaaatgcttaatataaatggttttaattccgcaattaaaagacacagactaacagattggattaggagactggatccacttttctgctgcatctaagaaacactcctcatcattaaggagagagatcatctcagagtaaaaagagagaaaaaaagtagtctgagacattgaacctaagaagcaagcagaggtagccattttgatatctgacaaaatagaataaagggggaggggaacatcacaaaagacattgatgcaatccagagaatcctaaggacacacttcaaaaatctgtatctccatcaaacaggaaagcccaagagatagctgaatttcttgatatgtaaaacttactaaaactaaatcaagaacagatttaaacagactcataactcctagtgaaatagaaatactaattaatactttcccaaccagaaacagcccagggctagataaattcagtgcagaattatatcagattatccgagaaaaattaacaacaaatactccagaaattatgttgcaaaattgaaacagaagggacatttcctaatacttttcatgaagccacaaataccctgatacttaaaccaaacaaagactcaacaaaaatgaaaacatcagaccaatatctcttagagatgcaaaaattctcaaaaatacttgcaaaccaaatcaaaaaacataacaaaaagattatctaccagcattaaattggcttaatcccagatatgtgagattgttcaacatatgtaaactgagaaatgtaaatccatcacataaagagactgaaaggcacaaaccacataatcacgtcactagatgaagaaaaacctttgacaaaatccaacattccttcatgataaaaattctggagaggctagggatacaaaagacataagtacacatagtaaatacaatatgcagcaagaacacagtcaacatcaacctatctggagagaaactcaaagaattttcattaaaaccaggaacaaaacaaggatgtccactctctccatgtctattcaatatggtgcttgaagtcttagagcaatatgaccattgaaggagatcaagggaatccaagtataaaatgaataagtcgaagtatctttatttgctgataatatgatttgatacacaaaagaccctgaaacctacaagaaatttctacagctgataaacactttcagtgacatagaaatatataaaattggcacacaaatatcagtagcctttctttatagatatggcaatcacaatgataaagaagtcagacaaacactatctttcacagtaaaatttagactaactctaattaagcaaggcatggtagcctggcactcaggaagcagatggatgaatctctgagtttcacaatggcttcgtttacatagtgagttcctggacagtcagacaatgtaaaacaccttgtctcacaacaaacaatactcaagaagacgttagaaaatggaaagatctcacatggtcttacaccagtaggattactatagtgaaaatagccctcctctaaagagcaatttacaaagtcaatgcaaagcccatcagaatttcaccagttctttatacgaacttaaaaacaaatttcagcttcttaaaaaaaaacattaaaaaacaaaaacaaaacaaaacaaaaacacagaaaggcttaaatattcctgaataatgaaaaaactgttagaggtattaccttcccagacctcaacctcaagttgcactatccagccttaggaatgaaaaaccagcatggtatttgcattaaaataaacacatgggtcgttgggatagaactgaaaacccagatataaaccacacacctctggacagtgatttttgaaaaagaagccaaaaataaacattggagaaaagacatcccttggaacaattggtgccctgctcatcaaagtgagcgcctgcacatagaagtatgtacatggatgattatttgtcaacctgcaattcaaaacggatccaggactccaacatcagatcagataccttggatctgatagaagagaaagtggggaagagtctttaactcattggcacagaaaatgactttgtgaacaaaacaccaataacacaggcaccaagatcagccattaatgaataggaccttatgaaactctaaagcaaattcagcaaatgacattgtcattctgacaaagtggtacactgcacaatgggaacatatatattgtgtgtgtgtgtgtgtgtgtgtgtgtgtgtgtgtgtgtatacatatatacatacacatatacatataatctgatagagggttagtatttaaagtatataaagaactcaaatcactggacttcttgcaaacaataactcaattaaaaaaatagcatctagaactaagtagagagtcctcagaagatgagacataaatgactgggaaacacttaaagaagtgttcactgtcattagtcaccagggaaattcaaattaacactactttgggatttcatcttacaccagtcagaatgaccaagatcgataaaagaaatgacagctcctgctgtcaagggtgtgaggaaatgggaacactcctccgtgctggtgggagtgcaaacttttacagctactgtggaaatcagtgtgatggctcctcaggaagtttgaaaaagattcaggtatacggctctaagcataaacccagtggatttaatattccactacagagattcttgttcattcacgttcacgactgccctattcatatgaggcagaaattggaaacagcctagatgtttatcagctgatgaatggataatcaaaatgtggtacatttacacagtggagtattattcagctgcttaagagaagtgaagttatgtattttgtaggtaatggatggatctagaaaacaagtcatcctgaggtgaccgagatcctgaaatacaaacattgtgtttttctctcatatgtgaatgttagcttttgggttttcaatctgagtgttatgattgtgtaaacagaggctagatacccaggaagaacttagggaggcagagagggtgtccctaagaagaggccatagaatttgttgctatgaagagacagggcagactagagtgggcatactgaatgaggaggaaatgtgaggatggggtggggacagctaatactgaggccatttgaagggccatatggaaacctcccaaatacacatacatatgaaagaaatctaaatgaagtcaccaaacaatgagagagtcagtgtcccaactagacatcttcctccatcagataagacatctagggccagaaatgggttacatctatttgagtcattggtcaataggcctattgttactggttacactgcataaattgacagtgaggccttattgctggaagacaacacttacatctttcattgaacaggagactttgagctggtgcctaagtagaggcctcacctctactgagtgctcgtggtactggaagatactctgcatgctcccagaagactaaggtaataattaacccagttccaaacactgtgatctacaatggttacctgcctgcaagatatgctggcgcaatagaggcacacatgttgtggaagtaaccaaccactctgtgccttgatctagtactcactccatgcgatggaatgcacatctgacactcatcaggtggcagagaacatgagactgggtagcttggggaaaaccaaatagtttgttcttctacgggaaaatagcaataaaatgacttctaatgacctcctgctgtaatagcagatcagtgccccattcagccaccatcagagaggtttctttctgcaatagataggagctaacagagatccgcagctgcataacagtcaaagagagagattttggagcacttagtcctaaacaaggtatcttgttaaaccctctcctcagggtttacgaaatgaggcacaagcgcagtcagaaagaatgtaagagccatgggacataaatgaaggaaattgtccttcagccaccacagaacatttgtgtacgaactcacagagtcagtagcagcatctactgccttcacaaactcaagtccgatggattcccagcactgagagcaggaagtggacccaggaccccacccctaaccaagaagctatttgtaattgacacctgtttccaaagaaaaattagttttctccagcggagtctcagagaatatactagtcactcctcagcgaagacccattcctagcactaatgacccacaggaaatgaacccaatcatattgctgtagatttattatctcaaattgctttgtttgggcatgtttggtcttattggtctttatttgtatgttttgtttcccacttttgtgttttcaagtttttaacacaagtgtgtgtttcctgtttattattattacttggttttgttatttttttctttttggtttcttgtttattttttgaaagaaagaaagaaagaaagaaagaaagaaagaaagaaaggaaggaaggaaggaaggaagaaagaaagaaagaaagaaagaaagaaagaaagaaagaaagaaagaaagaaaggaaagaaagaaagaaagcaggcaggcagggagggagagagagagggagggagggagagaggaaggaaggaaggaaggaaggaaggaaggaaggaaggaaggaaggaaggaaggaagaatgaggtggttggcgaggtggggagccttttggaggagtttggaaggggaaagcatgattgggatatattgtatgaaaacaaatgttaataaaaagatctggtgaaattagttttaaccacatactcatatcctagcctgatatactgtccgattgatttattatataggaactgtaaaactattatttatcgaaatgataaaatctatataaaacaatgaaactatttcattttttttcatgctaaatccctaatgactgctaatggtcagttatcacacagtttatatttaaatattctggtgattaatcgaaaggaagcattgctttctcccttagattctgatatcttctatggtgttgcccctaagtcctcgtcttttctagagataggctatgcacagcatctccctgccctctccaggtgctccagcacagaattctgaattcggagaagacagaagtttctcctgaactttccaactgtcatttctctcctgcctgctaggttgggagttaactgtatttgatttctgttttaaaaattagtggagtacgttgcatgactccaacaataatacaataaccacagatcacaaattcagggtagaacatgttgcttcatgccagggtataccacacaaggaagtctttggcttcattgaagaaaatcttgcagtttagactagagtaaattcgtaggtggtggaggagaaggaaatggcctgttatttttgccatgcttcccgggagatatatacagcaggttcttagaggacttattttaaagcagcccaccaaagtttcccctttggtggaaaatctcaaataaggtgtccaaaatgaaaccttaaaaagggaacaggagctctctgtgctccagaggtggcgctgcgagggtgacggagttaattagtgcctgcaaaacgcggtttctgagctcatcagagaagtcatgctcatcccacactatttataacagagatgaagtgtgcatactgtgtgacatttccctctttttaagtaggggactccaaaaaagtcgtgggcacccagtcctaggcactgtgcaggggggcgggcagcagtgcgggggcgggcagcaaacgcgccaacaaacgcgtgtccgcgcgcaggtgccgggggcggcggcggcaactccgcatcggctgcccagagttcgcggcagctcgcgggatgctcctagatgcaagatgtgtctctggccagcaggaggaaggaagaggaagtgagagcagcggcagcaggcggcagcggccggcgacccgagtctaagtgcgtgcgttcgggcagcggcagcgggctaggatgggcacgagatagaggcagagccaccgccgtccgcgcctccgagagcggcgacagagcctcgggcaccggtctacgtctcctgccccggcgctccggcctctgggaaccctcgttgcggcgtcctgagaccccgggcaggtttgtaaagtttgctgggctggcgcggcgcccgactcgctgacctcggcggcccgggcgggggccagggcaagacgagggcgccgcggaggcacttttgtttcctcccggggccccgcggcgcgggcgggtgggggctgcgggcgccctgcagttgggaggtctgggcaaaggggcgtcccgagtgactagaggtacggggtggggaaaagcggacaccgggggcaacgccgggatggggctcagtgcaaggacccgtggaaacggccggggcagagtcggctggagggggcgcgggcgggctgcgccaccggcgtaggggtgctgggacctggcagagtgctcctgggaccttgcggccagcagtcgtggggctggagagtcaggaagcggctccgagtttaccagcgaggacaccggggctctctcgtgtgtcgcagacgggaggggatccccggagagcgcgctcccgagatggggcgggatgagctgcggggacccctgaaggcgttcgctaaggaagacccgcctcccggggccgtgcggggcttccctctgggcggctgggtcttcgatagagagaggctagcgtgggagggggcgtaccgcgcgtcttcccgggagagcggcgggcatggggcgccagggagggagcgagcgagctgcgcgccgcggtagccccgcggcttagaggaagaggaaacccagaactcagcccgccgcggtgcgcttgtgtggggttgggaagtctgtgctgtgctgagggcgcgcgccaggcttatatttgtgtgtgtgtgtgtgtgtgtgtgtgtgtgtgtgtgtgtgtgtgtgctggcgcgcgtcattgcggtgggggcgctctcctattgacccctcgggggttggggctctcgtccactgactcttctgcctggggccctttgaactaggcagctggggcaagggttgttggacttggattgacccgacgctgcagagtttggcctcaagcagggacagctccgagggcctctggacagctcccgaggcgctttgagctcaaggaaatgcacccagggactgtggacctcctgcctctggccagtaaggacaacctaagatacagaaagaaaattgtgtcttgagggaaaccagggaagaatttcagattttttaaaaattttatgtacaaaataaaaataactatcgtttacatactaaaaatcttcgagagcaacttgagactggaaaatccagtttacttgcaataatcgttagattgggaaagcaggcagtaaatccggtccactaaaggcttctggttatggtcttcacgtgtctcacctcttcagtagcggccaaggtcatttcaaggattactggtttcactctctcaatttgcaggagtggggatcgaacctggtcacttgaaggctcgtaacacagattccatacttttattttcttgcctgccctcactccctccttcttcctttctctccctcccttgccctcccctctttcttcttagctgaccctttgatcttctacttgtcactatgctccatttgctatccttcagcattgtagttaagcgtgtacatggcctttctgactgtatttgctacttgattcttgttaagttagatggtgttatgataaactgacagaatgacctcaattgtggggcctcatggtgaggaagtagggtaagctggagaaagttggggaacaggaagcttggggacaccatagtctgtggaaactcagtgcctgaacagtcactgggccagagattaggtggtcacatggtggatgaccatacccaccacagcaataggctcttgttaactgcggcaattttgacttccttacattttttttcatgtttactgctttgtcaccccaggacctttgcacatgctgttcttctgcccgaggtgctctcctcacatgttcagatgactcatcctttgcctccactagttctcagtttaaaaggccttggtggcctgggtcttcttaggttaccagtctccctctcagtatttctttactagttggcattatttattcatttattcatctgcttatcttatcgtcgtctctcccattaggatggaagtttgagcaggctggtgaacttgttcatagatctagattaactttttagcacaagatagcaatgtgctttgtgaatattttattgactggtggaaggagacttgcccatgctggaagaaagcactgggaaacatactaagataatcccagtgtcaatggtgagtaggaagcctggcggttatcacactctctcatctcctcctccacaccctgccactgttctttcagaccccttctgccttggttagatccttccctcagaagtgcaggctgaggaaaggtgtagagaagccattgcttgggtcagggcataaagaccaaagcacttcattaaaagcgcaactgttcctgatctgctggaaccttctctccttggagatgtattctaaagcctgtgtggctttaagccaaagaaatgcccctcctgcaccctgtccctctccctctctctcatagggatggagccagattgaaggcagacaagaggttgcttgcagggccaggagagggaggcagagggaaaagctgggagactgaccaagcagagaaaggcctgggcaagggagagaatggagagaaagcctgcagacaaggggattcttcaggagctgcagagcgcagagcatttctgaaatgtcagcaccgctcaagtgatttgcttgctttgggtgttcggtgtgagtgggtggggaggggtgtgtgcaggaagggagggctttgaagctctggcccagaggatgtggctgggggagtggcaagcggtgcaccagggcacgcgtgcttacttcatcatctggtccaagcccgaagcttcggagggatcatccctgcagcatagtgtttgccatcctcatccggaacagtgggccgggaggtttctcgctccccacaggatggcctgcagccatccaagtagatagctcggtttagacatcctgttgaatttggagaacgtggaagattactaaacctctctgccttacaaagcctcaagtgtttgctgcaagagttgtgtaacatcagttcacgtcaacgaacacggtgctttgttcgcttaaggttgtagcctaggagaagagcccgataccttagcgggtctgatcagcagtctaaaacacaaatgaaggctggtcctctgaggaggttgaggctgaaggatcttgaattagaagcaagccttgggtaattgctagttcaagaccagcaaaaatgtagaaacgtcgttgatttagcatgcaccaagtcatgggttctgtccttagtgccacacagaacagactttgactcttatatactgaatgcatagcaccatataaggttgaggttttaaaaatatgctttaataattctagaggttttgagatcttttacatcaacttgccaagaaatctccaagaagctctttcccttttacaaaatattgtttgtttgatagttaatagtttaatagttaatagcaaaatagttagtgaaagatgctgcttccagttggaccgcatacagtgtcagcccttgactttactctaaaaatgctattgtttttagactttggcactgtgccaggcccagatcccatcactaccttaggaggaaaggggacccaagtgaccagttgttttctgcagtgatgcagagtcgaagaatcctcagtagctctccctgcacttagaaggaaatcaaaaccatgcagtcttctggccaagtgttagcttttggaaatttactcatcccaacctttcatttcctagtttacccctgggattcagtatttgcgtgatgctaattgcttttggagatttgcagaggcagccattctgtttttggtagtagccacatgttagatcaggtattcgtgctgacttgggcttaagactgactagccacaaaaacaaagccgaagaccaagagcttcagaggtgtttgaatcagaagagtcatggaggccaaccatccagatggtgtggttttagtagtatgcgtggccctcgaaggctttccactgctcaccatagtgcatttaggttcagaaaagccagtctacatacactatgcatatgtactcagcagcatacactgtctgctgtatttcctgggtaatctagattgtctgggtgttaagaatgacaccttatctgtagtaggctgaactgaagcctgccaaaccccgccacgatcaatgattgccttaaccacttgtgcttcaacacgccataggcgcaggtacaagtacagaattttgtctgcagcctacaatgaggtgaacagttaagtactgaggtaggaaaatgtgtgggtgaaggaatgctgtctcatcaaacggaatgagccacagcaacaacctggcccagtgctgagcagagaaattagtcagatgtataaatagtaggagatgtttctttgtgttcttggcccccacaaacactggtttccagaatctgagcagattataattggaacctcagttttaggaattgaagctacagttggactattttagttctcactgttaatgtagggaacacagctctcttcagtaggaaaggctggcaactcactacttgctctactctaggacagtgtgctgggtgggtggtatctctggataagcagcagtgggctaggggatgggtgcccaggtaagatcttatgaagcactgtgtcagtatggttggatcatgagattgatgtgaatcttcatccacagctgacatctttccctattgccaactgttttggaaagagtagggtggtgttatcattttatagatggtattactagcagtgtggtgttatcaagctatagatggtgtcagcaccagggtggtattctcagtttatagatagtgtcagcagcagggtggtgttatcagtttatggatggtgtctacaggggtcatgggctctagaactaaactttatttagctcttctgaaaatttctactttccttccttccttccttccttccttccttccttccttccttccttcctttctttctttctttctttctttctttctttctttctttctttctttcttctttctttctttctctccacattatatattctggttagttccttgtcttgttggtgcagtggtatctagagatatctatactcctctatattgttaggaaatctctctacatagcagggcagagtagtttcttcctataacaccagcctgagcatcatagacaaccccatctaaaaccaaaccaaccaaccaaccaaccaaccaaccaatcaaccaaccagacaaacaacagtaacaaaaaactaaccactcctacaaacaaacaaaccccaacgaaaaccaaaccaaagctggctaaggatatggcttagttggtaaagagcttgactttataatgttagaaactgagtttgatgttggtaaagtgcttgactttgtaatgttggagttccccagaactcatataagaaaactggagagggggacatggagggagacctgaaacttactagtctcacatcgaatctgagtaactggcaagttctaaagatgttgtcttaaaaaatagagagtacctggagaatgacagctgaggttgtcttttggccaccctactcatgcatgcatacatagacacacaaaataaatttaaaatgttttaaatataaaaagaagtaagatacgccctcagttcaggtagggcactgctcagtggtattgatgggcttgatctacgtgtgaggctttaagtttgcgtctcagtggccatgaaacaaaaacacaacaaaagaaatgccctcagttcagaggggctgtgtcccgggttgccatgacacctagctcttgcgatggagaattccagagttgatccttctctgcatatttcattctcaaggtgcccttagacttgaatctagatgcatctgtggcctctcctatcagtcaagatcacaaaactggaggacaagggctatttattaatcagagagagaagggggaggtctttgccaaggaaaatgtattctttagccaacactttttttaaaagaagattgtggatgagttatggtgcatgaacccactgggagggaaccagttgtcaggggaatatacttcatgatgcacttgtcagcttctctgacaatggactaatacccaccaagggaactggaaacctgagcccagtaggtaggacggctcttctttctgcaatgcagatgttgctgctgttcttccttgtctacttacacacgccaccccttttatctgtcctttattttgggtctcggccttggcactattgacattttgaactaagtaatcctgtctttcgaggactcttccatgcattgcaggatgcccaccagcttctctggtgccctttcactaggtcccaacatctccactcaggaacaaccaaagttgcatccactctttgcaggtctatggctgggggccaaccccagccctcctctctcctccctgggcaggttaagaacatctgctttgttttttgaagagatcagaacaattgcttgtaatctgatctgactttcagctggagttgtgactggcccagttttctgtcactggctattccttggagcctaaactaaggcagtgtactcacagatggggaccatttatgttcaatcatttgctttagtgtcctccttaacttccctcacggctaagatgcaattatcatcctgagtcaaatggtgatgagactttactcaccttcctggatagcccaggtagaagaaagctaaacagggagtttcgatcccagtttcccggcaaggttttgagtttgactgctggttgttgaattaactgtgacctttacataacaattaagagggtaaatagatggagcgggtggtaagcagttgtcagggtagctcagttagaggcctggtcacttggaatcccgtaattgaggacaatatctgctctggtgctccccagataccccttggctgatcagctagtaatggatatgggtcttcagtcagtgccataggacctctagcaggcagggagaaactttaaagacattggcttatatgaagtcctttctcattctgggtattaacatttctgggcagtcttgtggcattattgtcttatgtaattatatgtcaaccttttatttgcctcctctggctgctgtaagtgtcaagtgcaatagctggtggcttctgccacacagaacctattggtgggtaggatattaaccgtttccccaagtcaacagccagctccgagtcacacagcctgtagcagctctccacccttcttccttccgccctctgtaccttttttttttttttttttttttttttcagtttgagattgcatttggagcgccacagttctgtgctctggggttcagtggctgagtgtactgcatgagatatattttccaggctgttacacacaattacccttaattttgaagtataatgcatttcaaaatatttttttttctgttttggggctctttatcccaaatgcataaaccgcagttggccttcagaggacatgtggcttgggaggttgagccagcagagtactttggtcagactgcacatttttggctgtgtgaagagtgaattccaacaacactcagtaagactggtttcaacttgactcctgcccacccccacactaccctacccaccatgccctagatttttctagtggattgctaccttagttacaccaattatggaccacttggtggaagtgactactagttaaacattttggcttggggaagtgaggcatattctttcctgtagtaagtgttacatacatgctcactcacacacacacacacacacacacacacactttgcctgataatgaagggtcctttgaagcagaggaataatgatgccatctgctaaattctattttccctaacacttgtcacctttactgaatgggaaccatgttaaagcgaattttctatcaagcaatgagcacatttccatcctccttggacccactccactgccagcaagtggcttagactcactggaaccattttccccgatcattatttgatcttcggctcaagagttatttgaaaaacatctgcctggatttgcatgagagaagcataaaacagctttatttttaaattatattttataaaagcaatgctgagtagagagagctgaggaataaagtgtgggcccagggtgaacaaagccttgaattctgtcctcagcatttaaaccgacacacacacacacacaatatcaattaataaataagagtcttaagtgcatataaagacttttaaactactgtttctaggcttaacctgtcacaatacttcaccgatgtcctcatgctcccatcagtcagctagctatgccacagccctttgaacagtactgtatgttctgtggccaaggccctccacatttggagctttgctagggatgcatgaatgagaagaagatcagttaagagataattgtaactaccagtactgcaggtttgtacaggcaaagtacacagattatcatttggggagggggatagatgtagaaaagttattattaaagaaagattgttccaggagctcagcagtcttggtggaggaagtttcttgggcaaggacaggagtctgttcttctgggagctaaacatccagttgaatggacaggaaagccaaagactcttaggcaaggaaaccaggcgatccaggtttagtgaggactctgtcccattgtagtctggacaaaagatgagacaggaagcaggcaggaggaactaacacgttactaacaccgacactatcagcttctgttttctagacctatattcaaataaacacccagtcttggggagaggaataaataaataaataaataccgcagtgagcctgctatgagggaaggctgccccaccccccacttccctactgagaccccacagctggctgccagccagagcagtcagaggggaaggaggacagtatgtttcagccacccactgaagaaaacaaatggaggattgatgactgattggatttaggaaaagaaaaagaatgattctttgaagtttggaactaggtaaacatgaactcgttaattgagggtttatctgattttcgagacttagctggggagcggaattcattatcttgctcagcctcagttttcacatctgtcagatggagttaatataaatccgtagtctctggagctgctgacatggggactttaatgctgactgcgaggtgtgcttgctgcgttcgttttgttgttatcatcaacgccgctggttttatcacttaagaaaacaatatagaaagtatactcgtttaaagacttacattgattgttgaactttcttcaagaggcctgaaccctgtctcttaaaagctcaactagactttgcttcatacaccactgtttcagaaacagagactttgccacgttaggaggaatagcttccattgtaaattaaatgagccaacgtaacagatcatgctctcagtctggttcaaatgaaaactcatgtaaagtccagctcacctgggaatttcacttcatttctaatttccactggggacagagattggaggatgctgctcagggcccttccccaacctttgcttgattcgagcttcctggaaaagggttgtttacagctgtccaactatagacaggaactctgagggaaactcccaaggtagtgaatagcaatggacaggcatttaattcagatgagctgtgttctgtatgattatgttatctgtaaaggaagcccagtggcccccaaacacttcataagcgaccctttcgaatcacttagaaacttcttgaaagtgactgcttaaagtttcagtggaatgtgagtggctgcaaggttttaactttctcccctaaccaaaactggttcattaagactgtcagccaggttcaaagagattctgagcataaaatagaatggggagaggagaagaaccatgacctgaagggacagacccacacagttctgttgttctatacagttaacatagcatctttctcacttttaaaatgttccatgtaggacatttcattctatggctacttccagccacagccactgttccaccatttatgtttgctagttctggccacggtttgtaagtaagttccttcaggaaggcagcagctagcataatggcttactagctccttccacagtagctcatatatccatccaatggtcatttagtaagcacttttgtgagtagattaaaagaaagataaactccagtttagacactaaataatatataatacatcatatataatatactatactataatattaataatataatatataaatattatatatagttatatagatactaaataataaatggaaacattggcttcagacagagatgcgccactggaaagatattctacagactgctttggaagtaaaaccattcctgcagtcgtgaaaagccacttagctgagccctggatgcaggtcttggttggacacaacaaaatgcttactaacctcaggatataaaaaattcagtccctttctgttctcaagaagagtgatgcgaatccttccgcttctgcaggcgttcatgcggcggtgccttcttcctacctgtcaggctcagtgaagagcatgaaaggcaatccagtgtcaaacctatttaaagagtcacagaaaggtttgttttcataagatgcaggattctgttgaaactgaggagttctgctcgccctcaacgtagcggacaatttaaagattccaagcgcctgggctccatttaccacttctcagttgctcccttttctgcagtttatcttaggagacacttccagctgtcagcatcttctccgttcccgagagtctgttttgccttggttgagcatgcagctctggaacactgtgtggtgtgggtcccagctcttggtgaccacagatgagaagccatttgtcttaagagttttgccacctcaggagcatgtggaagagcagtcatgtcagtaagccatcgccccagctgcagccagctgcttgcaagaaggcagagagaagagggcagaatagagattccagttctcagaagacatcattctctactagacactgtgttgtagtcattgctggctgaggttcatttagaatcttctcagatgtgttgctgataaggttagcatacgaaggcgaacaatgaaaaagtctgaggtcagttatggcttaggagggcggatagaacataagaagtcactgtgaagatttcctggtcagtttttatttcagagttcaagtcttttccaaaggcaatagtacacgaccagatcagaccaaggcacagagaagtagaccaataacagccttaataatgcatttcttcaggctgaagagatggcttggcagttaagagcactgattgcttttccagaggtcctgagttcaattcccagcaaccacatggtggttcacaaccatctgcaatggagtctgatgccctcttctggtgtgtctgaagacagcaatctactcacataaaataaatctttaaaataattcatttcttcttctttccaaatctataaattatatggaaagagtgcggttcatccagttgaaaaacaagcaaaagggaatatttagggtcatgggtacaagagaatccactgtgacatgccagtccttactattagagagacgttagagttcttgactttcaggagagaaaaaaacatgcacttttttttttccatgagagagggtttctctgtgtagccatctttcctggaaaccactgcatagaccttgttggcctctaactcagagatctgcttgcctttaccgcctgggtgctgagactaaaaaggagtgcatcaccaggcctggctactttaaattcttaattgctcctgaatccaaatttgctctcagtgcataactgaaatgtattttaaattcatttgtctatttatacatatttatggagtatcagctctgtaggacttcttccaaaattacaaacacacacacacacacacacacaacttctaggaaaaaaaaaaaaaagcacattcatcattgggttccagaactctatactgtttcttagaaacacttcttaatatttgcttgttttattctatgtgtatgagtgcttcgcttgcttgcatgcacgtgtaccacatacaggcctagtgcctgcagaggtctagaagagtgcatgagatcttctggaactggagttacatgtggtcgtgagctaccatatggatactggggatggaacactaggtcctttgcaagaaacataagtgttcttagctagagaagcttctctctaacccctctgtggaacatttcagatgactgaggaatgtgatatgacatgactggttctatgaagacttgtaataggaagactaatgttgtcagcacgtgggaaagaaatggaactgattttactggggaaaaaagaggtgttcctgtcaaaggctgtgaaaggggtggactctggctctgaaggaactaaagcccagagctctcaagctggtgaaccacagctttatgttaaactggggaggcaggctgagaaggaccatggacctgggctcttatccatgagacaagaagaattcagccatgttttttccctgaggagtggcagggcaatatctatgctgtgataagctcttcctggcttctctctggtcacaacatggctgctgctactacttttagaatctgacaatttctaatagaatttactcattagttcaaatcccttagacttttagcagcaatgtaaaggagtgatgcagtgtgggtctggcagcttgtacaaatgatcgaggacctggatctgtggttctcagttttgagaaggcctcagactctcgagaaacgaggaactgcatcttagccagattctgactgcttctgatccaggggaccaggctccagtttgtgagaaatattgtccaggtaggaaatgaggagagaatcaggaacccaaagtccaaaactcagcaggcagccagtagaggatgggaccagaggcttcccaggtgtcagctaggttccttctcccattctggagggattttcttccaatgcacttgagacagattctaaatcctttaagtttcctctaatttattttctaatcctttcatatgtggctcttttcttagctctgtgtattatcctggctcactctgtgtgtttgcctctttatttcattttgtttttcaatgtttatcgacagcctttctttgagagtcctgggttcaattggcaggcaggcgtgaggagtgccctgtgtgaggagctgaaaggagagaggctcatggataaagaagactatggctatagactgatttgccctgcagcagctggctgatctcagtgtatagggagagctcacttcacagttgccacaattgagagctgtatgcagtcaaggagggacaaggggagacctagttgaggtgggtccatggtctctcttttacttgcctccttcccatgcttgtcttcagaggggctacacataggccttctctagcaagaagttaacggagctcagaatttcgacttagctgtcattggggagagatgaatgtgaagggcaaatagcaagacgagaagtcacatggaaagggtcacatagtctgtggcactgttgctcgacagagagggactcagaagtgaggccacatctcctggtccacgtgatgccaccggatggtcctgtcttctgggagccttctggtattccccatgatgtcttcatgcagcacttgtcccttgctggcagtgttcatgtcaccttattttctggttagtgactttgtctcctggtagcctggaggatttaagtatgtgtgccatgctaagccataagaagtgccaatgggcattgtataataggaagaaacattgttacccatgagtgcttgctctgtgttcttttatagcccgtttgggacagctttcaaatgcattcaggaataactgacatgtgactctccttatccccaagtttgttgcagtccagccttgcctgaggtcactgtgacagaagagcttgtgggtcagagattgtgtcagatggtatattaactgtggagtgtcccataccccgggggccttggttactgccctggtgtcattccactgggcccagatctacctagaacttcaggagcttgccagaggagggtactgcctttctgctattacattacctctgctgaagggtgtcaatactttcctgccttgtaatcatctagtctcacagagcccttgaggggcataaacaaagaagacagcaactggcaagaatgacaaagcttttttctgggtcagactttaacagttctgtctccttcacctttgtccctaagacagccagcgttgaacttggaaagtctgtttcttttcatgcttccccagcccctgtgggtgaccaggcatttgtgacacacactgggggctaggatctttgccacatatgtggttgcccacacttcatttattatattctggaaggaccatggccttgataatttatgtttctgggctttaattgcatattctatctggagcagctatcagggttttcagcttgcaattgaaatttgatagcgcctgggctcttccttgttggaatgatttatcctggtgtccaagtgctgagctgagcccatttctttgaaaccaaaaaaacgcccacatagcaactttcaacttaaatgctgagttctctttcgaagtaacagagcagatctgggtttttggaaccacacgctctgaccctctctagctagtttcctcccgcagaaaaacggacaaccccttgcttcttcagtgtgtggatgctgccggtcactcaagaagtctgctctagttgttcactacagaagtgaagaaatagccaaggatgctgttgggccctcggagcctgacctaaggctcctaggaccacaggatctccataagtgccttctctgagtgggccacagtgggcttttgggtctcttggaaatggcatcatcaaagcctttgtccagtagtccctgaaaggcttgattcattccttcttcgcaatacatagacagtctgggtagacactaagtacattatgaggagagagacattagcaggctatacttttggcagtatagccaaaaggaaactgacctggcctttgttttgggtagcctaggaactggttgaaatgccaaagctttgttcttaggatttaggctccaccttcatgcacttgcattggaactttctgttctcacagaccaacagaagggtctgtagccttttgcattagtctgttttcacattaccataagaaaatgcctaaggttcagtaactttataaagaagtttattttatccccaagttcaggagtggaaggttgagggtttgcatctgttatgtctgcagatttccatgctggctcagtgtagcacatgggaggtgaaagagggcacacgtgtccctttcggcttctccttctaagaaacaatcagtgttcagttatgggaggtccactctgatctatctaattctgatcctctcctgtcattccgacctttaaattccacttccgctgtaagtttagctttctacatatactcttctctcactttgtagtgggactaaattttaaatggacacttagaatacagtctcaaatcaaattcaaataataatggtttctcaagctttgcctccgtttggattctaggataccatgatcaactcgttagaccctcaggcctgtgtgagttacactgtccccactgccatgttgatactacatccatgtcgtaactgtgaactgggaggcctgactgcaggactctgtcatgtacgtcctttaaacgtctttgagaatcttagttttcacagatcttgattggaataatctgccgctgtttagggtaaatttataaaaacccttaaaagttatttttcttcttgtgtataagtagaaattttgaccatatgtggtcaagataaaagaaaaatgtcatcaatgaatagaagaggctttggccttgtcaagggtacgttggatataaaagcttatatctttttcaattaatcaatatgtatgattttatatatatatatatatatatatatatatatatatacatatatacatatatatatgtatatattcaacctatcctctaaaattgtgtttctaagacaattatatgtcaccagtaggcttacactgcagagcacttgtgactattttcttgtatttaagtttgctggcaatctgaaacacatgctatttttaatttcagtaggaaaaatatgccattgtcacttgaaatcttatgacaatcatagtgttttctgcactttgcatactgattaaaaatttcaagtttgctgccttttctaataccaggctgtgctttctgagtctgagtgggacaggtgagcatctttcatctgtccctgatgccttgaggactgttgtgaaccccgttatggactttgttgatcatttcattctttgagcacttaatgccgaccagagaagtagggatatagcagtgatttgtccctccaagggaagaaggaggagccctagggacacagctaaaattctttggctgatgctgtccttcaggctgagtccaaaggagtgcttagtgggcgctcctgttcctggtggagctctgtggaacccagtgcttaaggactgaattaaggaataaagaggacctagcatcagggctgagctgccactgactcttgtctatatcctgcgtcatggcctctttagctgtcagtgttgagggagatggctagacgaggctgaaaggtagcaaggaggactctgtcgattgcttagatgcttggaagtaagaagtaccagtgaactcatggagctcaccagaacccactcagcagcgtggaaagcttacgcttgggtcttggccccggaaattctgattatgggagagtccctagaatccagggttatgcagagacccaggtgaccatgctaagaagcccttttagcagatctctggatgactcctaggtctgtcttcttccttttttctacctgcttgcatcttcagagtcttcttcataaagccatgctgacctcataaataggccgctctccctactggatcactgcatgcttctgtatagaaaaggaaacaaaaacagaaagaaaaggtaaaattctcgtgcttgtccacttcctcattcccaccgctggccttggaacacataagcctaaccatggtacgctgtcaatcttctgttattctgctgcgctctctcagttcctggcacagagcatctgatcacaaggagactttcaaagatgacacaatgggagagggctgaactggatcagccctttctctgcctcttaatctctgtatcaggccatgttgtgttactgtcaacaaacacctgattgtttggtccagtgccatggtggtgctgtggctcctgcttgggtgaaggcctcatgggtgatgtcatcacaaaagcaggaccgcatggcaggacagaaaaccagagttcatccctgagaactgttaataatcccttccaaggtcagtgatcccagagacctcttaaagacattcccatggcttcctgtgtgaacacgtatgagggcacacttaacccatatctactccacagcatccatcatctctaggaaagacttaagcgttccaggtcggacaagggctgtagctcttatctagctcatcttctctagcaggaaactctggtctctctaaacaaataataaaagaatgtctcatagtgcctatgtatttgggattacccactgagagatgctggctgctggctgcttcttcttcttcttcagtatgtgactgttacaaaggtaaccagctgcattccatctgttgatcggaagcccagaaaggatggacagtcatggagggaagcccctggggtggaagacagaggtgctgacattttaaactaggcgttttgctctgcaccgccttctacattactgctagccatcaccttctccaaacctcccttgtcccattgaaaaagaatctaagtgtgtgcgcgtgcccaaatcctcccctggatgataggaacctccaggagaggaggaaggctgacttccttgtgtcctcccacaggcacagttctgggtgcctccatcccacactgtttgcataacgggagctccacacattgccaaggctgcatctaaaatttaagcgcattcgaataagaatagagagagccttgggggaaaggtaacaatttcccctaagaggcataaatgccgcgtctgtgtttcccttctgcttttggattaaggaccgaatgttaactaaaaagtaaaaccacccccacccccccacccccgctcatctttcgagcagtgattaatttgcgtgctgctctccttttatctgttgagtctttgaatttttaaaaacacaaagtgggaaatgtatttcctaggggtcattctaatgcaccttttaattgttttgttttgatcttcaggctgtgttttagcttgaagaagagccagccttgtctaaaggaatttcatctcgagaatctggattcttgatgatgttcagatgataggagctcccggctctgagcatacacatgcatgttagctggttctgcctggcccctgtctgggataggatattccatgtagtcacagctgtgatccagcagcataacagggtttgttattttgagttttgcaagctcttatgaggtatttttgcattcatacaattttaatatttggggacaggttgtaccactttccagggaccaaaagtgatcattcagttttttccccttttattaggcgctaatttagcttggaaaataatttaatttttttttatggatactttgtttctttgacctagttctctgtttcctgggcgctgtgtcctcagaagatgaagtttataatattaataatgtctgcttattaattccttccgaatcaagcccccccccccccgcatgccctgtgcatccttcacattggtaattgccttagggaagcccatggtgtttcttgaatcagcagactggcttgagtactgttattattgttccatgtagcaccatttgtgtgtgcccagggtgggtgtacctaagtgaaggctcaagggccttcccaccatggaagagcccgtcattcataagcaaaaagagctgtcagctcctgtctcctcgaactataatttgctgcagcctggaaatgggtaactggcagctattaaaagggccttggaatactttgcagttaaaagcgaagatattaccagctgtgcttacacttttttttttcctcacagaaagactaaatattcgggattcgtaaatgcatgcaaaatgccaccctaggtcaattcttacacggatagtatagaactaattgttcttctttgccgtttcgtggacctctgaagcagagtgaccttctattgggtgagctctggcagtctggctgctgcagaagtgaggtgacaggagctgtttgcctgtgattaggtctgtgtaagcttttgctggggagggaagggctcttgtccttggccaagtgccaccatgcctgccgcatgcattttgtgacgtttagaatttgaaaaaattttttaaaaatgccatttctggttacaggggttgtgatgccctcctctggcctctgcaaacttcgtactcatgcgctgaatatacaaacatgcaggcaaaatacttatacaataaatataatagcaataataaatctttaaaaaactggtggggcctgtttagtcagtgctctattgctgtgaacagacactatgatcatggtgactcttacaggaaaacattgaagtgaggctgtatcctaggtttcttcattctcattatggagggaagcatggtggcacacaggctgacatggtactggagaagcagcaggcagctctgcatctggatctgcaggcagcagaagagagactctgtgactagcttcccaaagccccactcacagtgatatacaaagccacacctactccaataagtccatgccttctaatcctttcaagcagtgcccctttctaaatattccaatatatgagcctatgggatcattccattcaaactctggcagagagtgactggggaacacactcgtgtgcatatacttgtgcacctacaaacagagacacagttctttttacatgccatatctctctgctaattttgtatattacagagatgttgttttgttctgtcaactgaacttcagaaaagctgtgcatttagtcaaagcatttaattgcagtaactgtccatgttaatttttcttgacaggaaaatgatgtaagtatctgagcttaagggagagttaggcatgacattcttgccttggaaagccatgagtcatttctgaaactgtgttagtcagctttcatatgacaaaatgcctgtgacaatcaacttaaggaagtaaagttggtggtggctcacactttgatagtaacctgggccagttgcattttggcttgggggagcagcacaacagagtccgggacccagagcagagctgttaacctcttggcagccagaaaataggagggatggaggaaggaaaggaaggaggagggtcagaggaagcagcagcagcagctggagtctccacacacccttcaagagtgtgactccagggactccaccttcttccctaaggctgcacttcgtggctcttctatcaccttctggtcatgtcacaggttgacaacatgggcctggagggaacattcaagaaccaaatgatagtgatgtgttgtgtgtgtcatctgctcagatggtaagtgactcacaagtagcttctaactaggatgcctcaggtggtctggatcaccattctgcctgggggagggctgtgtgtgtgtgtgtgtgtgtgtgtgtgtgtgtgtgtgtgtgtgttctcaaaggtcagcttgagttttcagaagagaagatacagacaccttggtgacaagatctcggatggaaattccaggttaatgtttttcaggatatgggggaagtgagttaggcacggagactggcttttcaggactgctggagtggttctttattcattgtcatgtgcgtttgaaaaactgtaacgagcacattgtatctctgatttcattgacttcttgtgtgagatagcactaagctacagtaattttaagagaaatattaagtatacttgagctggaattgagtatttcaaggggagtctgggaggcactgatgtcaggcaaagccaggaagctgcagagggtcagtcttgctgattagtatgggctgctgacctcgggagcgtttgctgggaggacgccatcatttctttatgttacatcattttgtctcactacagcgcttcaattactagtactcttgtcccatagaggagaaaactgagtctaaagacagtgtgtaattttccacaggccagatctagaggggctgggctggctggaaagatggatagcatttctgtccatccttactcggtgacaggagctaacatcaaaggagacctttaagagtagttccgttgctaagtgattaggcaggcccttggaaacaaatatttatttagagctaaattgttgcaggtgctagcgacctcagacttcttcttgagcctcttgtccagagaaagctttgctctctatcaggatggtagactgtgtaggacaccctcggggaacttctctacattaatatgccgaggatggggaacctacagtcataactcttcttgtttctgtaatattaatgattctcagccttgttttaccatagtcttttctcctcctccagttaatcttggtgtagttgtagactttatattggatgaaaagcccatttaggacacagtgtgacattttttttactcattttatatatggaatatcaaaggtccatgataacttggtaacatctagttgttggcagagtttgtgttatttcttcattcaacagatacacatctattgtttcccatgtaccaaatattctactaaccataatgaaaaattaacaagagacatacataagcagtcatataaacattttgtgatagctggagtgagagtttactgtacccacttctccaatatcatagtcatgactgtgagagaaggtaaggtgttaggacgtgatgtggtcctgcaggtcgggatcccagagaaccctcatcacctctccagagtttgcagtgtacaaactggagaaccttccccagaagttgaccacacaggcactgggctctcagacttccagcctccagaactgagagataaaaatctgtcaccaaagcctgaggtcagggcacctcttcagcctggattgaataaaaaaacaaagagggcgggggtgggagtagtggaaagtccgcttcgactgagtattctcaagacagagggcatgtcctcttcacctttatcttctgttgctcagcttcttgtatgagatagaggcaacagagcttgaataaatatttattagataaattaacaatctgttgatgagttggaatttgtttccattcattctgtaactgaagttaacctaatcgtaacgatgctaatgtaaatttgttttagactatgttattcatttgcaaattaaaaactaagtgttccaagaggtccccagattgaagtaggtttgtctggtggtcaccacagttgagaagcccagttctaaacagcattgaccttagacattcattagaggacaggttgtttatgcaacaagttgtatttgaaagtcttctccataggtttctctgcattgctaacttgtgtaaatttaggtcatatatgttgtcattcctagacttttgattaagttactaaggtatcagtcttcaaggcctcacctaacttgctgctatcaacctgttggttgggagtgtatcatttattcagatacaaatggaagtcagaatcttagggggacagtcaatccttcatgggttaaattagaggattctaggcaacatgttcagctggcaaattttcggaaagtgcattgcctgaagattttcccataaatactgagaacgaactgacggttgcatagcttccctccccaatggagctaatgccattccagtagcagacaactgtgagcctgcccagtgtgctagaggctctgtgcatccatcgctgtcattgacggcaggaaaggtggagaaaactgactgtcctctacagtttactttgccttgcaaagagagtggaccttggtctgcacttaactggggactccctgcttaagtaagtcttgtctccacaaggtccccagattaccacacagcagagctgaacaggtcctagacagacagttaggagaagcagatcatttagttgagggagaggtgtcatcagtttcagagagtggtattttagagactgctggtgcgttctctttggtaaaaggacacttatcatttaggaaaagagagggggaatcgaacctgacattagctgtcaatcatctctagggttcttgtagaagcttccttcctcaagagcggggacttccctgagagggaatgacttcattttttgtggctctaaagatcctagaacaccagacatgtatatttggagtaatgtttgagtaatatggtaaatggaaagcagttggtttgctttggctgaggtggggaaaacctttagaagttagtatagaggtgtgggttttgccatacctgtggtctgcaccaggttgtccgatgaaatggcagcctctcgctgctgaagagaaacagcacaggccttctcatggttaggaaagaacttgtaatggggaagactaggttcagggaaagagcatggcacccgggagcctgaaacagttgagactatcaactgagttagctgtgggtttatgcagtgttctataggttcacattccttctctgtaaaatggccataataatacagaccatagacttttgctgtgcagtattgaacatgcctgggatacaatagcgtccaacaaatggtagctttggctctgaagctgtatcagtcatgcccttgccaggtccagaaaggagctctgaaatgcccttttggggtacctgaggctcagtgacctcatccacagggacctcatggtttagtgaggtctggttcttgccttggggcatatgactccggaatcattttactcattctaaaactctgcataaattgatgttgctcacccttctgtcctgatacacctacttcagtattagtaaaatccatcaaaacattgaaaatgctgaaagccaagcctcgtgagtaaacacaatcctgtttggcacattcctgccagcagctggactcttctaaagaaccagggaagctacatgaacatctgcattaatgccagtcatatgctgtggcttgtactgggtccctgaggccaaagcaaagcagagattggaggtggggttggggccggaggtggggcgggtgaattaagccaatcatatccagctcctcagccaggaagatgtaaataagacttccaggctgaaaactttgatgaataatgccggcttgtttctgtgtcacatttctttctttggatgtcaagcacgtaaccaacaatcgataaatactgtgtgcttgtttagtgaatcacattggggtgagaagtctgtggctaattttctcaggccgggattggctataatcttgttagccagatgttctaagcatcagagcacagcagtctgacaagccacagttatctctgttgcacaatgcaattggatcgtgaactgcattctttaaaggtcactatttttatggggtcagaggcaccacatgtctgtgtttgaagcggattatgtgctttctggtctcacccaggacagtgcagaaacactgcgaccttcacctgtggctccatacccctgtagtttgtagccaccagcggccacagagaactgggtccctgaaaggaaagctagggctgtatgggaagcatagatgagagaatgagccaagacaaagttctctgatcaaggctcaatgtttaattctaaggtctgaaatttaagggggggggaacccatcccccactttgccaaggatctcctcgggaagacaagctcagctgctcggccggtagtggcttcttgctggaagctggcaggacaatagacttcacctaggatggaagactccaccctgggtgggctagatgactgttgcaaaacaaggtctgaattagcctgctcaaggctgggggaagggcacagaagttaattttgctgcacctgtacactttgagaagtgggactgatttgggccggtgtaactagctaaccctcgtagctagcccgcttctgctgaagagacaaggctgttctcatcctggccgttggaagagcattcagtgaagctggagctatcccttatttcaataaagactttaatttatcacctcttcctttgaagcttcatccaccttgcttcatattcaaatcccaaagaagctagtgctgaatggagttggcagcttcaaaaccgcctggagttcagaagtcttgattatatgcgagaatctctaggctcaagtgttcttagctttgatatctgggggactatccacatgggcgaagatgtatcgcatatgggggcgagaacattgcgtgtgtcccaaatgaaccttgatattttgctaagaccgctggagatagaacagagtgggtttgtaaagggtgcacacagacttgagccctgctggctggtaattgcaaaatatgtgtgccccagagatcagaaagtattcggtgggcaaggtaaagagagtcaagctggatggattaagaaaatagtggaaaaagctgagagggaacttggcattcatttggtatttgtgtctgtttttctcttgaaatgggctgatgtgttggcagcagcttctgactgttgtcagagatatgaacatctgtgcttctttgcagaaaaactcagggttctgaactgtgtggtagaaattgtgcaatgctgctgcccttcactctgcaccctcattagaggggcccagcctctgtgcaaatagacttgtgcaagggaggtaatgagcattgcaggatgctggctcttttggtcttttttttttttccctgcatgttccaacaaacttgattttccaacagtgagctctaaggcttttgcattcacatgtgcacactctgttgcttggttggaaagaagaacaaaagataccaagttagcaaggtaattggggtgcagacgtggcagagggagccatagggatgtgtagaacttgagtgacatgttcttggaagcctttgcttccttagtcacttagttaatgctaaatgctgttacaaatgttaaaaggaaaatctcttagactaattaaattcaacagagtgtagtgcagagcaattaaaagcaaagcaaaacaaaacaattagtgaattggttagtccacagatgcaaaacaagaggaaaactcaggccaatatgatcaggcaacatttagagtcagaaagcagaaattagatatagagaagatctaattggttatagcataattggttaattaattatggctcaccattttacattattcaaattagctggccttctgcaattaagtgaagttcagctgctagaactgaccaaaatgggcattcacaaaagtagattcctaaattagtgagtttatttagcatgagtgaataccaatttttattgatctgttagggccagaatgctatcatggctttatgcagtggcttcctaaacattttactcagtataaatggcccccaaacattaatagtgtaatgcagtgggagtgtagtgcttgattgcttcaaagtctactgctgggcaagtgggttgccctgggtaacagtgtttacttgcaggacaccctgtgttcttctagtcaatgacatttatagcatacgaagagaattctgggacataaagtttagtagtgtgtttgtagaaagtgcaactgatatattgaacatgtcatgttgtctctgccctactgcaaatttttcctaaacagtgcagatctaggttggttgaaacaaatacttactcttgtattcccaggtaagtgtacagctctcaaccctcatcaaagaattttctttttgcagtggtcagatatcattcctaaaagccataactggtctaaatgtagagatcaagtgactgttgggggcccagccttgattaatacgtttataaagcaatccttatacctgaggatcagggaacatgacagaagaaacatggaaagattataagagccagaggaccagaatatctgctttaagtagttaattatttttattttatgtatattggtgttttgtccttatgtgtgtctgtataccatatgtgtgcctggtttccagaagagggcattgggtcttctggaactggggttacagctggctgtgaaccaccacatgggtgctaggaagagcaacctgagtcaacctggttctctagaagagcagccaatgctcttaactacagatccatctctccagctccccttaagatagtctgttctttagaaataaatggacaggaagatggtgaggatagggaagaggtgtgtgtgggggggtagatccgaggggagtagggggaaggtggggctgtgaagatgatcaagatacattgattgacattttcaaaaaattagtaaaaatagcatattttaaaaagaaaaataccaggcagtaaaatccttgcttatttataatgaggatgagcagggctcggtcatttgaaagtttttttttttaactgcttggtaaatgcatctctgcttcttgatgtccaaatatgaaatgtgttttctctgattcatagcctaataaaagtgtccttgcttggcgccccaatggagcacttagtgctggcaggggtgtgccggacagccaccctcactttgcccttcagagtaaaaactgttctagcttttctgggaaacaatctgggcatgtgtctgaacactcgtgactgtgactgtggtcctctcagcctctgcctgcctgggagggatgtttgacagcgctccaggagatgtgaagcccactgctccttccattcctctacacagaaatctcctctcaggtacgaaacagacacaagcagagcgtgcctattggggtctagaggattggggtctgcatagaaagttcgtaaggtgcagcagactgtctggaacctaggaagtgctccctctgtcgctgtctgctctagataaagatgctcaaagatgcttgccctgcatttggacatatgggaaaaagaaaccaactgtgcagtgacagttacctaatacttttactatttataaagtattataacatcatatttcatatttactgaaatcctaaaaggacaacaaggaacaaaaaaaattgcattttaaaacagaaaacagataaagccaattcaacttaccaccaaaaacactgagttaaaatccccaggaggcatagattcagaggttccatcttcttcctcctgttccctaattaccctggtctctaccgaggagcctaacccaggggcagtgtggtctcctgtcaatgcagagcttaagtccagggatttggggcagcatttattcaggatattttgtatggaagttctagaacacaacttagtgcatgctgtgtttgaagatggtttgttccccagaagtcaagttgaagtttagtctctagagtcttttgttaatggcatcaagagagttggaacttaatgtgagggtagaattcagaagtgaggtctttgggaaatgattagattcgtagccggccattcaggtagagctgccgtggctgagtctctggtaaagagagagcaccaacaagatatgtatgctcctgccatggtgctatatggccaaggcagacccttgccagagcctgcgtcctgttgttcatactagcctacgcaattatgagagaactacatgactttttttgtataacattattcacctctggtactctgttatagtaaccacaaaacagactaaatgtgatcctagcattgatttcctaggagcagctttggaagagcacagtgggcctgagggtgacagctcctgttcctcctcttcctactctacccagaagcttaactctgcagttgaaaaaggactttctgtgaagtctgtaggactgtgtactcacgccagaaatatctcagctcctacctagcctggctggcattctgcatgtagtttagtcttcggccaaatattagaagtctagcatcagagctgggcccttgactcttactggtttccttgtcctagccagtaatccttgaccatagaaactgaaatttccctttcatcccagcttggtgaccaatgacctttctggtgtctacctggagactcttgattctgcctgtctgttgatggaagaatcatatgttcctgtgtctgccgtctccacgccaggctcggcccagtacttcttatttcaggcctactgatgctggcctggttactgagctcattctgacacatccaagggaccaatattccccagacagagccccactagggcagcatatgtgctcccagatgctgaagctctctctcagtctgagaggcatagcttagggaccggatagactcaatttcaggttctgaaatctccccatgggcctaacctcattgtagtgaactgggccaggccactagatactgcatttggtgatctgtttttaagttcctcattgccggtgtacttgtggagttgcaggctgctgttgagggagcaggggtgactaagctgctctcaatggcgctccgcctacaaagtctagaaaagggacaggaaataggtgttttagtttcccttagcacacagattgaatggagtggctagtgtgaatagtgaggagtggctgatgagcactctgggacaggtcgttctgtttcataacaaactgcagcaaataggataactgcacccagtagaaactgccactgttacagctctggaaactcggtctcaaagggttgagagatccaacctccttttgaaactttcctattttttccagctcccgggagcctctggggtttactgacttgttcagaatcttctcctctctccatatgactgtcccctgtgtgtctttgtttttatgtcgcgttgcttcgttttgataaccacacctctcacgatggaataaaaccattcctcatgaccacattttaatttgatagtgtctgaaatgtcacgtttatagacaaaggctgaggacttgaatacatcttttctgtggacacaatttaacatatcagctacctatgattttatcttcctgccccatctccagttgtatggccactagcagaacagtttccttgctctacatgtaggcaataacggtatcttcttaggggttgctttgagacttatgaggtcatgtttggctctgtctggtgtctgtcatgctaagaaggcgtggcttagcacttcttcccacacccttctagtcttttggttacacaaaggagtttggaagtgcatgggccacacacagacattaatgttgagatggagccagaaagtgaatgttttgaatactgtgacacagttttttgttttgttttgtttttttcttttctgcactcaaatgctgctgcaggcttgttgtcagcgcgtattatgcatttggttgtgaggaatctcttcagctagctgctctttaaagtcagtgccagggaatctgggcattgagctgaacagagtgttgctcttgaggttccagctcggaggcctgtgtactgtgcaccttcgttcctggcctaccatccaagtgctgctctatgtgcagaggcgcagctgcactgccactcagcttgtgggtcctccttggggtttagtgaggttaagagtggtttgttactgtatgactcttgaaccacgagtgacaatctgcttgtttaattatgtagtgggacagagatttctgattccaaaaaaaaaccccaatattccatggcattaaatttgaaacttaggcatttatttactgagagtcaaactcttctctgctctatctccgtgaggcttgcattatcagtttcatagatagctgacaaaatgggtgctttgtggcaatgcctgatgggaaaagcagttgctacttttgaaggcctaagtaaagcttcatttctgagaagcccaattaaggagttatcagcagctcctttatgttccgtacagatcagttgcagatcttaaaacagaacccagactttggatgctcattcagtggagctgataagtggaactgcagtttgcagatttcattttcaatgatctaggaccttggattaagaggcgtaaagattccattatggcatattttttaacttgattgtttcttttctggaaattttattcttaatcatcttctggaggcatagtagctactggtctgtgagttattgaggtttaacttatgctaatacactctgctctgttttcttcccaaagcaaataatcaaaaattaatgtgtaagttgcatccatttactccacattgagagttgttatcacttaaatttttttattttcttttttctatagtcttgctgaccttttggaagatacactgttcatgtattaatatattaattatttttcttctcagtgtgaatgactacaaccctaccatgtacatgttatgcacctatcatgattagtactgttagagtactttagatagattgctattattatttctgttttgagacagggtctcactctgtagtgctagctacctttaaactataaaagttacttagactatgttggccttgaacttctacatcttgaatgctggggttagggacttgtatcaccaagcctggtcctgatgttcgatttgtatatcagttctcctcaagtcctgctttgataactttctgtatatgataattataagtggtggcacagagaaagaactaaactagatagttctgtgatttgcaaaaaagatttattagggagcaaactgtcatcaccagctctgggagtagggggtgggaggtaggattgggcagagagaaaagaaaaatggaggaaaagcaatcagattttatatgacagcaaaggtggcgatctgctgtgatgcaggctctctgggttgacccggaactagtcccttgccagtagttgacctctagaggaaggctaaggaggagattcctggaggattaagggaggttctccgtgatacaaaatgccttaagaggcataattttccatgaaaactctatttacctgataacaatccttcaattgtctgaccagagtcctccaacactgctgctttgaggaaaggggtctttagacctgacgatagtaatctggggcttatgggaatgaccttgcaaaggctacatgtttataaatggtaggtccagaacgtgaacctaggatgtgatgctgaacccttagatcctaagctctatactttggtagacttggtgcatctttgcatttttaggagagaaataacggtgcaatccagagacttacagtgctttgagtgggctccgaattgtctttgccgtgacacatgatgtttttttttcttagatattttcttcatttacatttcaaatgctatccccaaagccccctatactctccccctcgatttttcttttttactgaattgtttggtttagagaggacatttgtgctaagttacctaggcagttgctaaaaatcactgtgaattagtcaactaagcctccaagttgcaagcgaaattgttgtgaacttaaaagatttacgggccacacacagataagggacagttgactcaggtgctactaagaggatcactctgtcctagagtatttatttcagaatgtcacttggtacttgagtttgtgaagtaaatagcactaaggtcaaagcaatttagataactggcttaaaaattatatatatatatatatatatatatttagctgcaggcatttctcaaggttcttagtacatgctgtgtggtgtgcaggctcggagagaacaaagggggcgtctgtgttttcaagtggttctgatgggtgtttgattgttctttttattctggcaggatgagagtcgttgactgcacttaactgttattatggaattttccagtatagtggctaggatgaatttgaaggtaacagacagaaaccccaatgctgattggctgaagcaatagaagattgaccaggaaaggttaaagatgaggggagctgcagaatcaggctggctcaaccactctctagatcattcaggacttggtttctttctctgtttctgtccctttcaggcaaggttgagccttgaaactgggaataggcaaattcctcatcaaacaagcaaggtagtcatggggaatagccagaataagagtcttatacctttttggaagaacagatgttgcgtggttgctagaaagatggcagcaggtgtctatgataactggtcacttgaatacatgttatcaatttatttgtgagtggtgagatgtttttgatgaatcttttaatagttgcccctataaaaaagtgatttctggtgggttctataggctgcctgtctgcattcttcagcctgccttcggcaattgcacagactgataagacaattagtgtcagttcttcacatcaaaggcaagtttcagttttaattttcttaacgaaatgagtgtcatgatttattgctgtgtcatttgcatttgtacttgtatcaatttctaataaagtatcttggtggatataagttgactttgttttattatctttcacattattacctacacagtgctcctcagatttcgggaaatgctgcagggtgctttaatgtaccccgggctggagctttcagcagcaagaaatgcagtctgggctgcagcttgcatgccatatgagtacttgcttttggccatggggatttcttttgagaagtgaaaactgtctgcagatcactcgcctcatttggcagttgctgtttgccttcaagcaccggcttgtatctctgtactctgctgttcagtgtatcaactgattatagttacgggtgaggcattttgtgtgagttcaaagtcgaaggagaaatgaaaccttcctggtcattcatactggtcacggagacgagacagtcacacagaaactttaatgatctagtatgaagtgaggcttgagcagaggtctaggagactcagtggagtgaatgagagaagcacatttgattgggtcagggaggagaggaatttggacatgtaggttattgagaaaagggtgatcttgcctagcaagagactaaatgttataaagcagttaaaacagaaaggaaataaggtaatgctttaaagaagtagtgatttattgttatgaaaccggttaccctcaaggtattgtggctcgaccagcagtgagcttctctctgtgtgtccagagctctagctggttatgaatccaggggccctgagctgggtgcttcccaataagggtcctttacttaagaggagatagttagatgttactgaggcacaattatctgaagtaccatccagggatgccagagtcattccagagtgagatgctcacatgtctgtcaaattctgcaaatgggggatgttgtttgatgggggaatgctgtgtgaacatcctaatggcacagcagctggcctctagagaagaaaccagtcagtttacggctgtgtgattttatgcccgagtcttggggattacaagaatccctacctgttgcataacactcagttatgaagaaagggggaggggacccgattcccgccaaatattctcggagtccagtaacagggtgagcacgtgtgtggcttcaaacagcaaagcggcacggtccaacagtgggcgtggcaaaacgaatgaacaaaaaactccacccctgagcaagcaggtttcagactgggggaggagagactacacctacccaaatgtccagtgtgtttggaaagactcagagtgtcggccatcttttcattactgtgataccatactagaacccgtcagttttgtaagagggaagggtggttttggttcagccctagagatttaagtccatggtcactaggctgtgttgcttttgtgcattggttgagaaagtgggccagctcacaatggtcgagaatccaagagagaagaagaggtgcccctgaaccagtattcacacatctaactcctttccacaagttgtggtaccacgactagggtgctagccttgcagtttgggcctctagggggtcagttactattcagaccacaggggctgctgaggaaggttgaggaagagaagggactgacactttttttaaaagggaaaagtgtctgaaagaatgcagacaccttgcaaaaccaaaagcacacagaacagaaacaaaaacagtatctgtagctgtgtttctttaaactatctttacatgaatattcatagttggttcagtattgtagcttttttggttggcaaaccacggtaaaaataatgtcttcatctactacttttttttaatatttatttttttaaaaaaaaaaaggattacatggactggagagatggcccagtggttaagaccattggcttctcctccagaggtcatgagttcaattcccagcaaccacatggtggttcaaaaccatcagtaattggatccaatgccctcttttggtgtgtcaacgacagcatgctcataaaataaataagtaaatctttaaaaaaaaattgagaactgaagctttgtacagaaaatagggaacatgcctttggagcacatgttagaaatgtgggaatgactgaggcagagcctccctcagttcccatgttggtcccacaaaactctggcaccccaagaatggagttgcctggaagccactctgtgaatctatccatccatcgatcgatccatcgatccatccatccatcatccattcatccattcatccatccatccatccatccatccatccatccatccatccatccatccacccccggtggataagagcactgactgctcttccagaggacttaggtttaagtcccagcatccacatgacagctcacaactcaatgtcaccacacagacatacatgtaggcaaaacaatgcacaaatcaatcaatcaatcaatcaatcaatcaattaatttggaagaaagaggacctgaaatacaacagagaaagtcacccactagagcacattgcctcttttgtttgtttgtttttttgtttttgtttaacacagttaaagggaaaagaacaaagagaaacaacacattaattaaagaatattgaggttgaaaagtgtaagaatgttaactttttctccactatcattttctactttttcactgctacaattcatggtgcccacttgtgagttctttttaaataaagaatgctgtgcttatgggaagcataggagaaccagtggctggtcttaagagtttactgacagaggtgtgtgggaaagggtgcccattaacaattcagtgcgcccttgggatttcccacttagaatattaaggaagtggaatttctgtagcttggtaattgtttcttaaaacaatttgctaaagccagccaaatgctcagttatgcctccccacttcccgttctggctgctggggttctattatgaaaatggagaagtgggggagggagtcccaactcttccttagcagagcacagctaggcccaggctgccttctcttgttttgtgctctgacctcccgtatccaatcaggtacactggctcagaaagttcaccgttggcttcactgggtaaaaactttttcactcagggcttctttatttgtatttgtattgttcatcttgatatgtgacccattggttctgtttttcaccagcactagcgggattggaatggaaccgaggaggagggaagggagagcaggggagtctacctggtctcactatgtagccttgcctgacctggaactgctaggtagaccacactggcctggaacacacaaagatccacctgcttctgcctcctgaatgactaaaagcaccatcacacagtaaagtaagtcttttttagtaaaatcatgacagagtgtgatttttgtagcattatctggaagtgtggatacgaaatggacttgtggggcagagcaaaccttgatcctgcagaagttgctgagctcagcatgagcctgcagaactcagctgcagacccagggtttgtcagcacaactgggcttctatgatgaaccccacgaacctcaccagttctctgcaatctgctggacactacaagtttcaggcgtgtacctcgaggttgtgatcttccaggagtctaaagttggtctaatctaacttgatcaatgtttatcagggtctagatggcaactgtcctagtgacttactgatgtatacaaagaagcctgaaacccagtggcttctaaagcaaccatgcttgcttttttatttattatctgtttgatttatgctttctgaagatggggcctcatatagctcagggtggcctcattgttaacagagcacactctatgtactatgtgctttgataaaagatcagccaccatacttagcaacaaagtttgattttgcccctgaaattacactcctgggcagaactgagtgagtactccatggctgggcttatgtggagttcaccaggaccagtgagtgaggactttctgggaatttaggccccttaggagcccccagcactggggaattcctctgtctttcctcacctctccctgtcagctactgagacttttattgcctctgtagttttgcttaaaaaaaaatctgtgaagttgtgatccaacttttcatagactttgtagacagattgatgcgctagcatggcggctcgagtctcagcagcacactaggccaagacagttccatggggaagaggttttactgggagggagagacaaggtggcgataggaagagaagagggagagaagagagggagggagggaggtgtgttctccttatttatgtgaaaaatgacttaacacaggtaaaggtgggaggtgagccaagtgtattctgggaaaatggtagctgtcatcttgagaacaggtctgtaggtcgcactgtcgcctatgtgatgtcataggtttgggaggtcccgatgccaacacagattgcttcctttcttcagaaataagtgtttgagattaactcatgtttttgtccatggcttgataacttcctttctcttgctcaaatttcactgtgttcaaatacctacagtttctctgtttattgaagggcattttggttgcttctgagtttgggaagtgatgggtaaagctggtgtaaatatttgtgcacatgcacgcgcacacatgcacatattacataagagtcagagagaaggagagaaaaatatcctttaaacccaatcttttgtaatgatgatattttacataaccttttcaagagcaggaaagttaggttccgtgacacactcaccagtacctcttctatatttggatgtttacagcccaaaggaatgttagtgtttgtgtgctctccccagctgccaacctaatcaagattctgaactgttttagtctacaaggaacctctctggagctgccattttaaaatccatagtctaaccccagtcctcttccctggtgactgcgggcatggtctacgtcttccaaaactgtctttaggttggcctgaatgaacactcgcatctgtaaaacaaggagcttcccccctcccagaagctggttctaaggaagttgtaatctgcatctgttttctgcagaaactgacacgtcgttattagtgttaatgcggcagatggatgaggctgagattattttgtgatagggaacttacacaaggttcattagcaaattcctttaaagaacgacccactttacctcatttaaaacatgattcaatttgcccgaacataatgtgtgaataaatttttagagggaacagtaatttgtattcactaaccagcaaatgataatgtggttaaaaaactagcaaaatgagagagcataagtgagctgggagagtggaggcgacctcagggaggcaacctcagggaggcgacctcggggctatgcaggtgccagagagagttttattgattttactgatttattaatgaaattcattaattcaccgtactgtagacaagatatatgtttaggatatcaggattattttaactattgagggctcagagagcacagcaatgtgcacgagaagccaacgtagcacggctttgaaaggaagagtaagagtggcccattttgctctgaggctttgaccacagcgccagtctccaggcagtgcctggtgtggtgtaaatatctacctggaaatcaacgtttgtgccagaaaattctttagttaaattgtcaaaacaacttcactccagagttccaaagcatggtttttcaacctctgcagtatttacgctttgggccagataaatcctttcggatgagcatattagttttctgtcagtgtgaaaaataactaagaaaatcagcttaggatagatgcattttttgttcttgctttagcagtcccagcccatgggtggctgccaccatttccttttgggagtgcatggcagagcagggttgttcatctcagggcagccaggaagcagggacttcagctgtcaccggtttgcctccctcttctctgctgttcttactgtgtgccagcctcaatatgatggcctcaaaacacagtgactcttagcctccaggtcatgtcctatgccatttgtctctgggaacatattcgcaaagtccacaaaagtgtgctttcgtaacttcttaggcatcattctgtctagtcaagttgatatttaaagtttgccactgtagtgggtagtgtaactgtttgtagtgtggtgtgattgtcaatattgttggccagtgtgcactggtttccaccagcactagtctctcagggcaggaagcatcactcctgggtaagaagcacttctttatcgtgtgtgcacgccagcacacacaacacacacacacacacacacacacacacacacacacatacacacacacaccaaacattcctatgtagagtaaataatttatttttggatttatagtaaagatctggtgcttagatgatgttatttctcttgctttgttcatgcattatttctgtgattcagtcttgtatctagcagtttatactttttattattattattattattattattattattttgggttttcgagacagtgtttctctgtgtatccctggctgtcctggaactcactctgtagaccaggctggcctccaactcagaaatccgcctgcctctgcctcccaagtgctgggattaaaggcgtgggccactacacccagcataagcagtgtatatttttactgtagttcattaggtgctagcttgtggctgaattgcttcctaccatgtagtgaaggcttagtctcccatctgtggaactttttggagatggctatgcctttaggaggtggagcctggagttagtcactgggtgtggccttgaaggagctcctgagaccctcacctctcctggtcctctgtcttcccctctgtcaagagtgagcagtttccctgtcatcctccaccaaaacacaccactccccccatgatgcactgcttcattacacagcaagaaataatcgggctagccagctcggcaaaatcaacctttcacctttgtaagttggcttatctctggtgttactgtaactgaaagctgactaacaagttgagccacttcaagactgtgttctactttatttatctattgctagacacacagcttgcttttactttcagtataacaatctcattctttaatgattagtgtgtgtgtgtaatcctgaacatatatgtgacagctctggacattgaagaaaagcaccataaagtttatccaactttattataaaccagcaagcacattgctttcccgagacaccacgctttctacctccttcgagcagtgtctgtgatcctgtttactttgtatcatgattggtgtttcacacggtctttgcccatctgaagagtcacatgctattttattgttgctttattgtgttttctgatcaccactgcatcatcatcaccaccaccatcaccatcatcatcatcatgctgtcttgggaaggactcttaagatctgtagccatacattttaaacatgcaaaaaaacctccaaaacaagcacaaaacaaaacaacaaacaaacacaaagttttgaatatttttttttatttccactcttccttctatctctttcctcggaatgccattgcttccctggtacatgtccctcattgttgtcacactgactttggcatctcatcaaatagacttgtgtaaggaggctggctagtattagcagaaaaaaacaactaaggactttagcaacacacatttctctgcttttctaattaaaaataaattattttatgagtgttttgtctgcatatatgaatatgtagtgtatatgtgtgtgactagtgctcatggaagccaaaagagagtgttgtaccctctggaactggaattattgtaagccgtcaaatgagtagtgggaaccaaaccagataggtcctcatcaagaatagcaggtgatcttaactcctgaggcacttctcctgtcccctttcacaactgtttccctgaccctgttgcttgcttgagtggtggaatgagccctaagaggcaataggtgcaggagacagtcccaaaggctggtttctcaactcagacccagtccacgcagccgagatttccccattgctgcccgcagctgcagccgactggaactgcagataagagaataaagaattgatattgtccttgggagaatggaggccagtctccttgaggcaatcctctcagaagtcggctgttgggatgttcatggctggagttagcggaacaggtgggttcctctgtaatgactgtggaatcttggcaaaagctggcagtcccagagtcagccagtccatgtttaaacttcctaaggacaaccttcctcccagcaagtcctcctacttgactgcagtgccgcgggcacacatgcatgttgcattggtttatggtggccagagctgggaaatcaagcagtacagtgcctgggaggcagcatctgtgaccttgtgcatttgtcacatcatagctatgtgcgtccatccaggcaaactaaaagtgtatttgttttacttgaaagacctgtttttcttaagtttctattaaacttggaagtgactgcaggcaagcaggcctttctcagagctcagctttgtgacctttgtgtgtgtgtttgtgtgtgtgtgtgtgtgctaaatgatagacactgtgtgtgcaaatatcttatcaaacttaagaatatgtcttgcgtacaaaagactgtccttacgaacttttacagcctactgcacacaggcctgttggagaggcccttctgttccttctgcagatctgtgtattgagcagacatctgtgggtgacctatgctaggcagcatactgtcacagagaggccctgtcctcgacagctccctgcaaacagatgctgtagtcactagagagaagagaggtaccaggcagtctcgggcagagaggaagaactgaagaactagtctggggaaattggaaatgtttccaataggaggaactccctgctgtatcctgaatactgtagcctgtggctgtgacggagagggtgggggcagggtgaggcctgtaggggaggagactgtagggagagactattaaagacagaggaaacagtctgtgcaaaggataggagacagctgacttaggattgaaactgtgtctcactgggctctgctggtcttttagtctgaggtattcagaacacccatgtcccactcttgtgggtgattcatcgcaagagaatcttatcgctcagaatgatgctataacccatgtcagtacccagctggtggctccattactattgcttcattgagcaggccccagtgatgcctctaaagggaactttggtcagcaaaggctttcttttggcatatttcatggagctggaactctcagtgaggcctcctggtcacgtgccatttgctttttattcagaaaaaagaaattcaaaaggagaaaaaaaaagggcaagagacatagccaagcaataattcatttaaaaaaaactacttacatctgcaatctacttagaacttagtatttaagttggcattccaaaatacaaacaaaaatgtatgagcaactctccaggaagcttctggaactagaaaaccttctttcttttcataatgagatggaaaacctagctaccctccacagcagaggaagtgctgccccaagcccgcgcagccccaggcctcacaggtgggcgtgctgaagtatgtattgcattatcaggacctctgcggaagccatctgggagatttatatttactaggttgtaacttccagaaacaaagggagcctctgaacctattctcttcctgccaaagttgtcattattggtgggagcccttgggatgggctagccagctgggggaatggcaaagagctaatgtgaacaggagaaggaagctgtgggagcgagccactgacactgctgagggcttcccttaccggtagcaggaagtggggagccacccagggatggggctggggctggggctacttttcctgtctcacagaaatcatggggttcaacaatcccacggtatcacatgtccacctttacagggtcagaaagactagttctttgttgtgactattgtctctgctcactctccggcctccagacccctggcaattaccatttatgagtttctacagttttttttttctagaatggcaaaaaactcaagattatgcagtatgcagccttttcgtactgaacttgaaagaactcagtggggaaacccccactcagctcccgattcggcgtgcacccaagaatcacgaatagaacacaacaccttgatgtaacaacaagaggttttttttaatggcggagctccgggtcgaaacgtatctcacacaacaggagacagtggattcgaccacgaggcttggaagctaggggtttttatagaaaaggagtggggctgggggaggaattggcgcggtttcacatgattggtccatttaaacatcagcagcctgtaacatttaacttaggtcagaggggtgggagctagggaggcgatgggcttgcccgggcatgtcctggtctgttctgctatgttctcaggtttcaaagctcagaaacaactctttgggctatttaacatacattacatgaattacagttttatttcctttcaaactggccttctgttgaacagctcatgtatgtgcctactgaaggacacgtcggtagcttcacagttcacttcagctcacaatggtttcttgtggatatacatacagtcttgactcttttactaaggaatctcaaacgggtcttaaggtctttccagctgacagaaggcagccactagttctttctgaatctctctaatgtctgttcatgattcccagctatgaggatatgttagcccaaagtccgctgctacagtgaaatccctaagatgatatgctaggaagaccaaagggttatttggttcacggatggctttaggtttcgaggtttcagtccatggttagctggctctgctcttggggccctggttagaacagttaccttatggcatcgagcttaatgtagatccaccttgactaggagatggagagaaagggagtgggcaccctcgctgatctgccttcctcacatcagcctccttaaagctttcatcaacacttggacctttctgaggacatttcagatccaagtgatagtaatgattagttgcaccaacaagcaggcctcttattttcatcagggcagtattgcagtgggaaaatatgtttctcacacctgcctccaggttcatatttcaagttcctataagaaaagacagactaataatggagaaacattcagaataatttactatgagcttaggtgatgacgccacaaatcaggcaagtctgtgtccctgtgaataggtttgaggagagactgtgacgttctggatgggcagggagtttaggaggaccctgggatggattagtgaaataaggagactgcatgactctgtgtgtgtgtgtgtgtgtgtgtgtgtgtgtgtggtgggttctccagcactgcaagacagaaagcttggctgagatctctgaagagagaaagaagggcccatatgtcaaaggtgggagacttttcttaaactttgtgagaatctaggagattttacagcaagagcctacagccagacactctgatcccaggctggatgcaaggaagaggttggaagcaggatatatgcccttccttccaagagagcacataactcctttgatgttaattcacttcccaggtgagaaatcccaggtgaccctgggacactgggacagtctgtaagcaagggaaccccagggtctcagtagggtgtctattgtgtctgtgaaggggaatgctgctccagatagtgtggcttgagccgaggttagattctagcatcctatggattgtgattgcatgtagagtatgatccaaccataatgaactggggcaactttacaaggcctgttgttggttcagtctcttgtcagtctgcagcttcaggcccttcctgctgagcacagagagacacctctcactgggggttatatgacttgcacagcagggaaggtctaaaagtcatttctaagctttatgactcatttcaggagggaatgatgaggagcaggtgtgagtgaccttcttgcttctgctgtgacatttttgggggtagtatgcccaggccaccatctcctcaagtttcagacatgagcttaggaatccctacaggaagtatgcaggtggtatagctttggggcctcttaattgagttcattttctctgccagtaaaagaattaaaagataggaaaatcctgagagcaacaggttgcagcagagaaatttcaagatattgcagacaacatcagacaaagtcagcagttgaggaaaattgttttctagggatcaggaaatgcatacatgcagcagacacacaggaaaagaccctctgtaagggggaagctgaaagatccagtctcttctcgagggctggggacttttaagtctctgaagaattctccttccctaacgtagggttgttcagtttgatggaagataggctcattgattggctgacaactgatgtgtaacatgtcctgatcagggcttgaacttgttgagccagtctagctcactggtggggaacaaaagcatgcaaggcatttactgctaggtgttaaacccaggaccaaaggctgagatgctgattaacatatcaaagtggaccctggctgccaggttctcccagcatccaatcttaataggctccacctggctggcaaaccctaccccttatcctaaacttcttgaggccagaaactgggctgggcttcctttaccccagctcctctggtccctatataattctgccatttggctatgtgatttttgattcatggtcagtctcttggcccaaccccaactttgttagatggcagctcctcttatgctctcttccctactctctcctcacatggccttgttctgtctgtccatctttattctggactctctaaatgtccttgcttctgcccctttctgtattctccctcatttctacagttaccttctcctccaccatacctagaagcaactgtgtcttttctctttttcattcaccaggcctttgtctcaagtcagaaaggtgaaggagaagctggtcatcttggacgttcatcacctttattacttaaccagggatcttctctctagctatctgcctaccaggggttatgtctagctcccagcttctcaccaagggaagtgtagagagagctaggctctgctttcacacttctttctggacgtgcttgctctcctggtacctttagcccatggaattccttaatttcctttggatggctctgttacagctccagctaaggatacagcatccaggtagatcgaagtttcttttgaggctgagccttctggatacgtgtgtgtgtgtgtgtgtgtgtgtgtgtgtgtgtgccaggactcttctaagtccctgacaaaaatctttatgagccttcacttgagaagtttgcccatttaaaaccagattgagagaaaatttcacagatccattcccagaggggtacttgcttaacatctgtaaaaagttgcagagaaatggggtctgattagtcttatgttgaaacctaacaatgactgggtttgccttctagcctgaaaacagaggattctgtgccatctttaaagtggtttaaatcatagttcttccttgacaaggctctggtctggaaggtgtgataaggagcgggctgaggctcctgtgctagttactggagtggcaggcaggcaggcaggcaggctttcccctgctgttttaagagagcttatccagtctccccgagtgcaggcaggcgtggtgtgtgatgtcttccttccttccttccctgtttctcctctatgtttatgagaaatctgtagacttttcaaatgagcactctatatttgatgtagtatttaatttgtgcaaggaaatgcctgtggctttaaaatcatattttagttaaaatgcctcgtaattggcgtttatgccctaaagtgatttgtatgaacttttaggaataggtaaacacatgaaaataaaaaataaagcgtaatgctgtacttcctaagggggaatgtactgctgtgtggagcagaggctttttctgtttttggagctgaccctactggcttcacggcttgtttacatggcatctgtgatatatgggcaatatactaatagccattctgctcctgtcatggggcatgctggcttcccaggctcactgggccatatttaagtaaagaatcttgctgagtgacagctaaagggcctcggagctcagggagcatatgctagctgatgttcttggctcatctcactgacagcacctaactctccctggcgctgagtgctatcccattttgcggtggaagacagtgacacactaaacttgtgccatattaaatagctaggaaacggcaggcctagagctaaagtgtccccagaagcccggacatttgtcactaaatcaataactctgcttctggaaaattaattggcattcatcacatgatgtaaggagagagaattagcaagtttggggacacatatctgtgccaaataacttgcatatttatatttgcttaatctttctgaggactctgggagtcctctggagaaaggggtttatgctggtgtgtggcggaaaggattttattatccccatatataactcacaagattgagggttgaaaagtgaagaatgaggtttgtcaaaatctcccaagtgggttagagaagtggtgccgcaggtgactttagtgccagtgcctttggtctttgtgaatttgtaaaatttccatccaaatggcttgctgttccaacgttgtctgaaaggatggggactgtctgccagaggaaaagagtagaagacccttcttcctcttctgcatccctcattgtgtgtgtgtgtgtgtgtgtgtgtgtgtgtgtgtgtnnnnnnnnnnnnnnnnnnnncaaagagaaaggggaattcacctggaccagagaacatcagctagcctttgaaactctcaaaaaggcactgctgcaggctccggcattggccctgccagatttaaacaaacctttcaccctatacattgatgaaagaaatggagtggcaaggggagtccttacccaggttttgggaccatggaagcgcccggtagcctacttatcaaagaaactggacgctgtggccagtggatggccctcctgcctgcgagcgatagcagccacggctgtgctagtaaaagatgctgacaaactgactatgggccagaatgttactatagtggccctacactctcttgagagcatcatcaggcaaccaccggaccgctggatgaccaacgcccgaatgacgcactaccagagcctattgctgacagagagagtaagttttgcacccccagccattctcaaccccgcctccttactacctgaggctgacgaggcccctgcacataagcacacagagagagagagagagagagagagagagatattttccaggatactcacacaatagcgaatgctttggatgctcaagtgtctgcctagaaatggtgcagaatttgcatgtaacctatccacaccctctgggactctttaaatcatctctacatgacttgtaactcctaatgcaatgcaaatactatgtaaatagttattacactgtataatttagagagtaatgataggattttttttttttacaagttcagcacagtcgcagttttaaacccacatactacaatcagcagctggttgagtcaatgggggtggagcctatggaggaagctgctgtactgggctttccctctgcctgggctggacaggcatttggtgttaagtagaggaggaacctgtgttggtgcacagtcactttgcattttcctcttgaatgtgtgagacttggccctggtggttttccaccatgagttctagacctggaagcatttacagaattcagatttatggacaagaaaaaataacaggcctctgtgagaatttcctcaccctgagagtttgttaactgagttacacatgggatatgacaccatccctcactgtcagtttcaggcagactctggagagagtatcaaagcaggagtcagaacctggaatatcagctaggtctaaggaacttcctttttgggagaacacactcagtccgacattgaaggaagatctttgtttagccaagatgcaggattgggtgtcctgactagcggttaccactacaggtcttacgatgagtgtttggcttgaattggtgaatatgcttcgttattcatgtttccacagtgccttgtcccctgagcccctggtgtttacgagctttcccttgcttcttaggggggagaacctcacacataagtgcacacctgctcaagttgtctagaggttcagttgtctctacacagtgacattgtgaccaatgacagaatgcatatgtatcagtgaacctgtaatgtaataacagggctgagatattcctattagagtgacattggagtgtaaggtcatagtgccatgaaaaatacccatgcactggtgaagttactgttaacagactacatgctgacagttgtatcaaggtcacttggtaataaattacattattggtcaaagtagttactaaattttcttatttaatttaatttcattttattttattttatatgcatgtactcacatgtgcagaagcccatagaggtcagaaaaaggcacgggatccactggaacaggagtttcaggcagttttgaatcatcctgtggatgctgggaaccaaatcaaggtcctgtaaaagaatagcaagcacttttaacactgaaccacctctccagcccctcctatattgtgctttcaatcatcattttagagtgtactcatagtgtgtatcttgtttcccaagtctcttcatcacctcaagaggctacatgcaggcctatgccatatgtatttgtccagaaatattacagagatcagttcacctaatgacacatcttaggatgcatctggcatgtaataatgcatggatgtttcaaaggatggcactgatcatggtcatccttcttccactgtctaagaaggattagtgggcattgtgtttggactgctaatgtctccccaaagtacatgtggtgaagacttgggtgcagtggacgaagctgattgggagatgatggaaacgttaggaggtgaggcctagttagagtcacgaggtcattgtgagtgtgcccttggagaatgcactgggattccccttcctatctatctatcctctgtgattcctcaccctaggatgtgagctgcattgctttgacatgggatcactaccatggcatttgccttcaccatgggccccacttgaatgaagccaaacacctagggaccaaatccctgacttaagtaagccacttgtcctctaggttgcttatctcacgaattttgtcagcaatgcaaggctgactgacacaatggctgactgtaagctcccctgtgttatgatgggaatagcaatccattctgtcctctgacccctcacccttctctggaggatgggggtccttgttcccctactgatcactagaaaggttttccattatttcaagtatccaggaaatgcttgctgagagggaaacttacagacagaagtatagacagttggtgaagcatcctttcttattccctacctcagtttcatatcctgtttcttgagtgaagtatatagtatcagaagaaagggacataataattgggtgttgggattggagagatggctcagtggttaagaacactaattgctcttccagaggtcctaagttcaattcccaagaaccatatggtggctcacaactgtctgtaatgggatgtgatgctttcttttggtgtgtctgaagacagttatgtgtactcataggcataagaaagaaaggaagaaagaaagaaagaaagaaagagagaaagaaagaaaagaaagggagagagagagagagagagagagagagagagagagagagagagaaagtgaaagaaagatacatcttttaaaaagatgattgggtgtttacatttaaatggcatgtggaccaagctcacagtagaagtgttaaatcctgaaggctaggaagggaaaaggctagcatcttttactttctagatgactgtgaatcaggcttaaaagcctttcactacattttatgtgtttatacaataataaaaagtaaccctgggagtaggggagggcagtaaacagtgtctctattgtattggtagacactatgctgggcactacaaatctgaggtcctttaattctcttgacagtcctagtgaatgtatattattcgcagtgctcatgagaaagttgagcctcagaggagacagggcagcacagagggaggtcagtgtggagcagggcccactgtgtgggcaggaatgtgctcaacagcctgctggcatctgctgtgaatggcctctgctttccctcttgatattcctgatatgtgtgcttcaaggaagagcagggctttctagcagttgctgtgaaatctttgataatggaatctttttattttcagtgtaggatgtttctttaaagtactgttgttctaaagagtaggaagacaaaagacaaatgagttttagaaagtgtctttttcaaagaagccttgaaaaaagtaatcctggtttcttgtgcgtcttgcactgtttcagatttttatgtacaggaaagcccaattaattcagctgactatatattttgcaaataatctagcttgttcattaaagccaatgtcatggctgacttcccagttagcttgtgtcttctgaggcactgtttggtcttcagtctgtaccctgtgtcttctgggctcagctactggatatagacaaatgattcttcagactggggtgcactcaggcttcctgttccttttgtgtatcttagagcagccttatgagctttagagcatcgctatgacttttcctctccttactctcgtgccttatttgtgtattacatcccttcactactctcccaagatgccccattttgtccagtgatgtgaacttttcttgtttccttgattttggttacgttataggtctataaggagtatctccattacaaatgattcttgtccatgaaaaaagataaaaggacaattctaacacctagttcatgacgacatgagaaatctggtttaattactttttcttttgagaattgagcataattgtgccttctctactgtaacccttagaacccatgtctacaccctgccaatggtgacatctcattaaacctaatatgtctttatcgagggctcattgtatgtttttatgagttaagtcaactcttttataaaagagttctttattcagtgtgtgtgtgtgtgtgtgtgtgtgtgtgtgtgtgtggtctgtacgggtgtgtaaatgtgctttggtacatgccatgatacatgcggaagtcaaagaacaggttactgctaatctgcagttctcttttgtcttggtttttgaggcagggtctctattgtttctactactgcagggcttgttatacacacttttgccaattctctgcttagtgggttttgttttgttttgttttgttttgttttaaatgggttctgagaattgaactaagataactaggcttgcccaacatacccttttatacctcctgagcaatctccttggctacaagtttttttttttcctcctcaaaacagagtttttctgcatagccatggctgtcctagaacttgctctgtagactaggctggcctcaaatgtagatatatgtctatctctgcctcctgagtgcagagattaaaggtgtttcctcccaccatccagtgtacctggcctcgggtgtttaccttttgaaaattgcagaataacactaggcccaggctagaagcctccactttcattcttcagttaatgttttgcaagttcttcttgggagagcttattgaggtctccagtggacttacggagcctaggagctgaaaggcgctcaagctgctgatggtcagtcctgaagcaaggccccctgtcagctctcctatgctccattatcatgaaaacacactggtgtcaggaatggcaggctacacctcaggatgacacagtgagataaatgacaaaaaaacatgggttctaaggatgaaatttgtggagggaaaagatgaaaactgctcaggaaatatttatgatgctgtggggttttctttgtatagaacaaatacagtatggaatctcctgtgtgactgttttggttcactgtggcattgtacaggtctgactgtgacattgtacaggtctgactgactgtggcattgtacaggtttgactgtagtattgtacaggtttgactgtggcattgtacaggtttgactgactgtggcattgtacaggtctgactgtggcattgtacaggtctgactgtgacattgtacaggtctgactgtggcattgtacaggtctgactgtggcattgtataggtctgactgtgacattgtacaggtttgactgtggcattgtacaggtttgactgactgtggcattgtacaggtttgactgtggcattgtacaggtctgactgtgacattgtacaggtctgactgtggcattgtacaggtttgactgtggcattgtacaggtttgattaggaatgtcctcattctccgtctcagacttgaatacttgacttttggtataggaggagaagtgatttaaagaaagaaataacagggggctggagagatggctcagcggttaagagcactggctgctcttccacaggtcctgagttcaattcccagtaaactcatggtggctcacaatcatctgtaatggcatgtgatgccctcttctggtggagttgaagacagctacagagaaannnnnnnnnnnnnnnnnnnnagagagagagagagagagagagagagagagagtcagagagagacagagacagagagagagacagagagtagagagagagacagagagagagagagacagagagagagagacagagagagagagacagagagagagagagagacagagagagagagacagagagagagagacagagagacagagagagacagagagacacagagagagagacagagagagacagagagagagagacagagagagagagacagagagagagagacagacagagagacagacagagagagagacagagagagagagacagagagagagagagagacagagagagagagacagagagagagagacagagagagagacagagagagagacagagagagagactcttgcttttcctgaacaaaatcacatacccattatgtagtgagagaaaaagatctgtaagtgcctcctgattctcaccaaatgtgagattgtcacttctcaatacgtaatcataatgaaaatacgtacagtctcctcatttagctctttaccaccctggcgtgcttgcagcattttacaggggcctcctcatgaaatcatacaattgaacataatttgctatgcttaaaagaaaatacatgagatgtaagttataaaaccaaaccattagtaggctgctccaactccagtgctcccagaattaattgttagagaaatacaagaagatggcagtggggggagggacaagaagaatcaacatgtctcccagccctccccctttttcaatattatgaaagtgcttccagctctgcccacaggacttgctgcagcagtgacactgggaaatcataaactggaacccagcatgccatgaggtccaggaactcagactataacttaagatagcctggctctcacgatgagatgctggttgtatgtttaagagattagggggtcggttttttatctgccagtgttaagttgttcacacttaactcttctcattgtagtcaaaggctccctgcactatgtacttaacacagaagccctctggcctaccctgatgtctccctgtcctctatcccttcctgctctgtataagcccatgtagcctatattttcacagagggagccagtccctgtttctgctctactgttcctgccccagattaacccttttggcctttgatggcatctggaagacacccattcagatctctgctcgtgcatgtacatgtgcagcttgctttccttctgttttctattaatgccttctgcccagctcagacaggtacaaagaagtccctgtggcctggccactttgcttccaaccctttggtggttcccatcgctatggaatcctccctttgcatatagtcaggcctacttctctgtttacgtctactttcaggtttctgcatgtgtgggaaagaattgaaccctttgttgtgctggactgcttttctttcaaaccggcttgggtaaagcatcctatctcaatgctgtcccacggcgagttaggtacagtattcctgtaagaagacctgttctcctttggaccaccataccctataatgggcactggcatcactctgcctaaggaagagactttgcatacctgtctgtgttaacaaatcaataaaggaagagcataactttcctctgttttctccccaagcatatcctgtcagttctttcctttcaccagtttatcgcatctcagtgtcaaggcagagtgcaccatccaatgtagatgtgcacaagacacaccccgagaccctttttgttctgctggctcatggtcagtctccttgggcttttgggaatctgagcaaagcaaacgctggagaaggagtcaacaatagtgacagtggggcaaaccaccaggcaccacctgaggacacccaaggaaaagttcactgcttcaccagtctgtgctttccttccccaaatgcatgagctgaatgagagcggagggaacattcaacaaaaccaattcagagaggccttatgcaaaacagttagcctgcaatcttcacaagtgtcgaggtccgaaaaatgaacagaagatggaaagaggtgtttcagtgtgaacatggcttggagctagagactgagcagggaaaagcactaggtgaatctgagctgcatccttttgctatcaaggacggttgcaggcgatgggtggaatgtgcttggggactgaggagcaaatggaacgtgcagtaatgtctcttttctgattttgatggccatgttgtgcttataatggaatgagcattaatgtgcttgtggctgatgaggcatctggttagcagatcacccttactcacatggtctgagatgaatgacggctctttgtactgtagttgtgcttttatgatttcaaacacttttaaagaaagaaatcaatcagtcgctgtggactgtcgccatggtgggacgtcctgcacgtaccctcatggagtgcgtgccactggagcttccgtggacattggaatgaatgacaagtgaatgtgcggtggccaagaagaacccctcatcctgtttcagtaaactgtagcagcaggtccagactgcacggctgctccaggacgaggcgactcccaggtcaggtgtaatcaacatgcttcctggaactgagagaccagagacagactgagagttcattgtgtcaactggcaaagttccaacctgtaggcaaacttcaagggaggcagagtagaggcctggagagtgctgggtaaacaggaactgggccatggtaatcagggacccacagacatctatcctgagctgctggaggcccccatctgataggcctcatgcttggctatgggacatggagtgagagggatgaaccaggagatgatggattccaccttacctgggatagagctgtggtgacccaacaggcttctgttttgtctgctttaactcatggccaccgttgttgttgttgtttgaccaatgtgctctttttttaggggtggtcatagtctcaggcagcagaacaaattaatagtttctgtttgactgcagagcccctgttgtgctggatagtttttgtgtcaacttgacacaagctagactcatctgagaggagggaacctcaattaagaaaacgcctccataagatctggctgcaggcaagcttgtagggcattttcttaattaatgatggtatgagaggacctaggccattgtaggtggtggcatccctggtcctatgttttattagaaagccacctcctgaacaagctatgaagtacaagctaataagcagcactcctcatggtctctgcatcagctcctgcctccagggttctaccctccttgagttcctctcttgactttctttgatggtgaactgtgatgtggaagtgtaagccgaataaagctaagttgctttggtcatagtgttccatccctgcaatgggaaccctaagtaagacaaatgtcttggcgggttcgcagctgtgcccagctctttctgagttggctctctgttgacttagaggcagcttatttcctgttctatcattactccttgtcatactgggatatcttacatgggtagaaacttcagttagagagaagctaggctttggagcctcaacttacctgtttcttcttgtattgaaatattttacttcctctaaaagcctttaattttcttgagttgcacctgaccttgagagatttaatcaaaatggatacctttatcaggaacacagtgcttccctgacaacacgaggttgtcagtcacccagtgccaagtttgtgctgcagagatttgtgtgtagagattactttcagtgctctctcagttgaatctcctgccctcctgcagctcactggactcttcctttgggatttctttgttccttgaacagatggctatgtctcttgtgtgaggtcccctgggtactacagagccctggagcctgtggtccctaatggctttgagataaaattcgttctctgagaggttttccatggctgcttgagattcggaggctgattctggaaagcatgacctggaagtcagtccacatctgagggcatggtgcggctcagtggttagagaccagacagaagcatctgggttctcctgtgagtgaccaaggccacgtgtgctagcaggtataataataatcttatcaattttgctgtgactttcagatggtaaacacacacttcatgcacatacacacagagacaagatgtgtgggtgatggagggagagacctatacacacttatacacagggtgagggagtcagaggggagactgagacggaaagactgccttttactggtgaaaagttctgggctgactataatttaatattcattttatcctttgttatatcaatgcttttacaagtaactgctcctgtgcctggcttgtctttctgtgttgtatatgttgaaccccaatttctaaacttaaagcagaagtcccccttttcctccactctgtacctatagagtgagacaacacctccattggggtcaccagctcagcttggtaccagggtgagaccacctgggctctaagggctgatgctggcaaccagtctgttctctttttgtaaagcatcccttccgaggggctcctggccctgagcactcagagacagagcagtggcctagacagcgggatagtaaacagacacaaggttcagatcttaaagatttgctttccatttgcaaaggaaacatgaaagcaagctctgtgtggacagaggatcaagtcagacatctgcttgagttagggacagtggtgagtctcaagacatggagcagtggaaagggttagaaatggaatcacctaaacacaagccattcagggcagttagggcctggtttccctttcctttgtatgtgggcttctgtgcatttgagagttagggcaaagcaggacagggcgtaataaactatgtgttccttgaggtaccaccctcagtcctcagctcttcccttcccatcccctatggtgtgggatagagagttctgttgtctgctgccagatgaaggtgtgcggacttgataagcagcctatcacttcatgcaagtcgcagctgacagggctgtaaggacacgctccttgaaaggggcgtcagttcatcatagtcgacgaatcagcttctggatcccagtgacagctgcggagtgctgatgtgtggaggaccaccagtcctgaatcccaatcaccttctgcatcttctgaccagtcctgaatcccaatcaccttctgcatcttctgaccagtcctgaatcccaatcaccttctgcatcttctgaccagtcctgaatcccaatcaccttctgcatcttctgaccagtcctgaatcccaatcaccttctgcatcttcagagtctcggttgtcatgctactgatggccctggtgctgcttgctgccatgataagctctgtacagctagcccatcgctgatatttccaactaaattgcttgcagactgagagctcagatatgtacttaatgtgcagctctgtaggagttggaaatgctggagaactccttattgattttaggagtcgagtgtgggaggtgggatgggatggctttgaagatttgggagttgggggacacacagaagatggtttataatgatgattttttccccagagagcatttctatatgacagaggttgcatatgcctaagagttaacgtatgattttgagatgcttgtgcttggtgctttgtgcagtcttataggtggagatggaaacatctggtctggttcggctataatcttgacagcctgcttcttgtgattgagagagagctagtttgccaattacagagctgggttatagggtcttgaaactagtgtgtccctgtcccggagcccaagctgtcatgtgtcccctttaaatgctccacaaggtggcaaatgggaagtttgtcttctggcttgtcagttcttcatttggagactcaaatacctgagctgtctagcagtataatatagtgttaccagtaataaccaccttggaagggatagaagaaaaccacacatgcccgtcagcacagcggggatgagaatccagcctcttgaagcagatccctttaaaacgtcaccgagactgctcggtgcttaaaaaacttcttctgagtcttgaaagtctttttctccatatgtaaaggaaaggttttatgtggctgttttgcttaatgtgggctgtttttattctggactctttgaagctcattatgaaggctaaaattctgctgtgtggagaagtaaaaaaagaagggaattgctgggctcgggttgtgctaaattaaagtgacaaggcacagataacaaggcacaatgtggccacagattagtcctctctaatttgctactgtgggaagtagtgctttgggcttgcatagtaatttctttccttgaattaaagttttaaaaagaaaacatacttttatgaaaaaaggagaacctgaaaaaaaaatgcattgtggtgtgtggtctggtggttccctgtgctcagggttcttagaggaagtcctgcctcaaacacatgtaaatgacatgctgttattttgggaaccttatgtctcaaaccagccccagagtatttcatgtgctgttttaagtacctctccttggtggacagttggcagcagtgtgctctgggtctttcttgtgcatcatgatacactatgttgcagacctagagtgaacattcctgaggaatgagggggagaacaagatcagagtcactttctccaagttgattaagttccagatgttagactgatacatgtgagggccagaatggcatttggttcctcaaccacagcatgccctgccccagattatactacttcattccttttgcctgtcttaacttctcagggggccgaagaggccttccttgtgactggtgaacttggactgtagaatcacaaaacatcagcttcctaagaagggtatcaaaactcaggattccggcttggtgtgattcagtggtgaaaaggttagaaggctgaaggccctgggaatccatctccagcacaaaacaagacaacaaacaccctcccccccctcgcaaaaagcccaagtagacaacacagagtataggtacattttactacaacactgtgaaattgctcctcttggggcacagcgagttagcttttgagtatccatgactgtttgttgagcttccatgccagctatttattcccaagctatcatgagtggcacttccattcacagtaaccttccttacatctgtcctcattgtcatattctacctcctcctcctcgttctcatccttgaggtcctcctcctcctcctcctcctcttactttctctccctgccccctcctcccctccccctccccttcctcctcctttggaagtataagcacatgctggggaaccattaactaaactcaggctcttcttgcctcttctggtttgagttgtgtcccacacaagggatataagcatgcgcctgtcatctcaggatgtgactcttagttaattgggtcattgcagatgtaattaactaagattgtactggagttgtggttgtactggagttcagtgacgcttcagatccactgaaattgctgtaagggggactatagtacaaagcgtgcatggcttgaactgaagtccgcactgcagaaaggacctagcagaggtctggcaggttcattctcgctccttcaggggagctcagctctgctgacatctccatcttgcactacagtccgcacaacacaaagcagcgaacagctgctgcttgagccgcaggtgtgtggagctttgttaggtcagtccttaaaaacgcgtgtgtttttcctcttggcttgagttaaaattgggcctagaccacatccctgtcctagacacttcctaactagtctcacagatgcctcacctcatcctgggctgattcctgtaagctctggacgtacaaaacaaggaaggggtgaatgtgtgtgtgtgcatgtatgtggaactcagaagacgtgagctgtgcgtgtcttcctctgctgctctctctctctgccttattgagatggggactgtcactgaactggacatttgccatttggataggctgcttgggcagtgaactctcaggatctggctgtctccatttcacagcgcttatgttacagaaaggtacagttgtgtccagctgtttactgacattctgaggttgcagaacaagttctcttacctgtcctctaactcctgaatattttctttaaaatacctctaaagaaacagggatgaagctgtgtctgtggtgacaagggacaggtgtgtgcctccaagttggataacgttcagctaacaaacttagtttttgttttgataaatgacattatcagccgtgtggtggtggcgcatgcctttaatcccagcactcaggaggcagagacaggtggatttctgagttcaaggccagcctgatctacaaagtgagttccaggacagccagagctatacagacaaaccctgtcttgaaaaacaacaacaacaaaaccaacaacaacaacaaaaaacaacaaaaaaagacattattataagaattagcgatacttagagggagcttgtcatagtgtacatcacacttaatttcccaactgtgacaatgatgctgtggtccagctggccatggtgctgtggttcgactatggacctgtggttgtaagaggacaggcttttaagtagacatgcaggtagtaggacagcaatagaaagcaaggtggggcaggtgtccctcacagtatgcttttctgtaggtctgaaattattttgacttatcagctggaaattatgtttatgagaggacgttttaattttttaaaaattccatataaaaaacctttgaactaatattttctaaatagaaggtaattttctttttttcttttttctttttcctttttttcttttttaaggaaagcaagtgtttccattgaatatggtgggatgtagggagtgtgtcttacatacataattcactcaagtggtagaaaaggctaatatgcaacttaaaatatttcctataagcactcagaaacttgcagattaccagctatgattactgaacacattttaaaaggagaaacaaaacttttctaagaagaaattcccttcagaaggaattccccggagaaggtgtaaatgaatactgtatttcttatgctattaaagattgactcttacacaatcttattttccttaggttacatgtatcatgagagcacctattttacatttaaattgctattgcctgattaactctcacttaaggtgttgccttaggctgttttgtgttactgtcctagctacttcttgctttaacagaatatctctcaaaggcaatttgaggaggggacggtttagtttgtctcacagtttgaaggtacatgatctgccatggtgagagaggcaccaggatggtaggtgtgaggccactggtcacattttgtaacccatcaggaagcagagagaaatgaaccttgttttgttctcaactccctttcttcttttcagtcagcccaggacttgaacccatggaatggtactacttacatttagaattggtcctcccacctcaatgaatctaaactagaaattccctcacatgcccagaggattgttgctttggtggttgtgaatcccattaaagttgatggtcaagatccaccgtcacagttaccaaaacagaacaaggaagactcagtagtttatgaagagcagaggtttgtctcctgtttgtgaagcctgagacatatgagaccaagggctgcatctcataagtcactcttcctgcatgtgacacagtagaaggcatgcttgggtaggaggcaagtggctggactcacagtcctttttacagtccataccaatctattactgagagtggagttctaaagacctaagtattagtccccacctcttaatggtcatagggatttaagtctctaacatacatattgaggggttcattggtgtctcagagatggcagcagccatttcctgtgtttctcttcgatacttcagggtagtagagtacaaactcatttcctagatgtttttccactttgagaagttttgttttccaaacttgactttctcctcaatctatggtaaactagctccccaccacccccaggaatgataatgttactaaacattccatactacatttgaaggagccctcattgtcttgataagacttgtctagtggaagaactgttagtgaagttttcacacctgggttctgtttccacccaagtacagctgtgaaactttaaacaagtcaccttctgcacttatggaagtccattgtatttaagaactaataattgacagtatcttcttttaagttttaagaattcttacttgtatattaatggatgtgcattcaatgactaaaaccatttacaacacaatggatttatgtgcactgtagagtttgtgggaattccagggctaacctgaatttcactgtctcaccctggtacttcagtcaccaacctaaaagctcctttattttcccacagccagacaggcggatggaagatgtcctctattatttatttgtagccatctaatcagtgtccattgtgtttttgtggtcatgggcacatgagcaatgagcagaaaccagaaatctccacttcagagcagagtggctaaaagtcttctagtaggaaattcccagcagagggtgaacagagccggacttgtctccctgtatcatcatccctcatatagcaaacacatggcattttggttgattttggattgtcttaattaagattcctgttgctgtaatggaacaccatgagcacagcaacctggggaggaaagggtttgtttggtttatacttccatattactgttcattattgatggaagtaggacaggaactcaagcagggccggaacctgtaggcaggagctaaagcagagactatggaaggcgctgcttactggcttgctccacatggcttgctcagcctacattctcatagaacccagaatcacagaccagggtggcaccacccacaatggtctgggtccttgaccatcaatcactaattaagactatgccctacatccagatcttctgaaggcattttgcaactcaactttctacctttttggtaactctatccagcacaattacctagttttttaattcttttttcatgttttgtacttaattttaacttttatcacccccaatccctttgggactagaaattgaatctatgcataataggtaagtgtatagccacccaagcatatttcagcccatgatgtaagcctttacaagggccataagtgtgggtcttgagtgctgtttaatgtttctgtatatgcaaggttatattgcatttatgtaagcttgagctacagagttcttggccattactttagaagtacatgatatctgtattaataaagattctcagagcatcaaagctaatagaatgaatatatgttgcaaaaggagatttagtaggctggcttacatgaatcagggtgaatagtccaacagccagggtctatacactggagaggcatagaatcctgtagctactcagtatgtggagccagatgcttaactattctaatgtggggctgacaacttggtaggttctggaagaatcactagacttcagctcatactggtacccaaacatacaggacatcgatgacagtgaagaacttcagacatggtgacatacatcctcaccaaagagagctgaagtctctatggttttttccctcagagctctgtttacattgctgtgaagaaacacaatgaccaaggcaccacttataagggtcaacattggagttggcttacaggttcagaggttcagtccattttcaccaagagggaaagcatgacagcgtccaagcagatatggtgctacatatgttctacatcttattctgaaaggaaccagaagaccatctcccatgtggctaggaagagtgtctcaaagcccaatctcacaatgacacacttcctccaacaagatcacactattgcaaaaaggccacacctcctaatagttgccactctctgagctaagcatattcaaaccaccacacattcatactggaagaatacctcccttacccagttaatcttccctggaaatggcatctcagatccctccagaggcatttattaattaattctaactctaacccagtgaacaatcaagattaaccatcacagtgtctttaataaatgtgagaacaaagctgagtgctgattgtttgtttgttgttgttgttttaaaacaacgtcatttttctttccaggagctagctctgtgctggccttggggagtcagtactgggtagttgcgtgcctctcttgatgtgaggacagactgtatttattatccttgtcttggcttcctgggaggtaagttgactatattaattgtcacacagcccaggaaaatcaaagtgagacattgtcatcattttgccagggcaagggtgaagtcaaggactgttggacagactggtcagatggccttcttgtcccagctgatagggaagttaaattacttcctttcgatagcattcagcaaataatttcacctcctacggttctgcgtactgtgctgttcagtggatatcagaaggaaataaacccagcatgtcccctgacttcatagagattacagcctattagaaaaggatgatataaaatgaataagcacacaaataaaatacattgctctaccttttgattggttctagaaaggaaaagaacaagctggaagcagaatgactgtctgaggagctggtaggtgaatcggggacaatttctctgaaaagatgcagtttgctctaaggggacagatgagtttctcaggtccaagaggctgacctgcagaggggaccttacagcctgtaaagtgtgattggctaatctgccaagacaccggtctgtggcggatttgaaaggcattggaaatccactggaagagtctcagtctgaagggatgttttgtgctgtgcattctctgagattgggagtggagggaaaagtagtaaatgtgagacaccagttggtcgcctgcttcagtggccctggagcatgcaatggcttcggtgcatgcagtggcagtagaagtgaagagagattggcaggcttgaaagggaggttcggatgttggacttggaaatcttggcagcggggctggagagatgtctcagtggttaagagcactgactgcttgctcttcaagaggtcctgagttcaaatcccagcaaccacatggtggcttacaaccatctgtaatgggatctgtgtgctgtcttctgatgtgtctgaagacagctacagtgtatgcatatacatacaataaataattcttaaaaaaaaaaagaaaaagaaaatcttggcagcaagtatgaatgttcaggatgaaataaataccttctgggaatgagtgtagtaggactgcttggattgggatgctattttctgaaggggaaatgtagattgtagagaggcagcatcaagattttgccaaggtctggaaagatggcttggtggttaagagcactgtttgttcttccaaaggacccgagttcaattcccagcacccacatggcagctcaaactgcctgtaactccagctccaagggatctgatagcctcataccactgcccattaaataaattatttttaaaaaaagatttcgccaaattaagtaagtatatcaacatagaaaacagtctataactagtggtttctttttgccattttgtcctggcaatgggacttacctccccccccccccacttttttttttctctctctctctgtcctagaactcactttgtaaaccaggctggccttgaactcagaaatccacctgcctctgcctcccaagtgctgggattaaaggtgtgagccaccaccgcctggctccctcacccccttgatgtgtgtgtgtgtgtgtgtgttttttttcctttgccctttctcctgtggatctatatgaactggagaacatacttgctaacttttcatcagctctctgatgattcttatgcatcattcggcagagagttaccaggcatcttacagttttgcccatctgcgagcatcttcaggttccaaggtgcaagtttcatatttgcttcagggtgtcaagaaagaggaacgtgttcttcatctgtttgagatcctcttcagggtaatttccgctgtgaacacattcctgcttcaagtgtctttggaaactttaagctgggcactgtaagaactgtgagaactgtgggtgtctctaactgcggggtgcttaaggggagctgtgagtcccagttcacagacttcctgtgccttttgattgttagtaaacaaagaaaatcaaaacaaaacaacaacaaaacacttaaaccaaaaacaaccaagaagcccaccactctgtagtgggtcaagtttaacaagagtcccttcagcccgtcccctgtatggtgctttggggcaaggaaacattcagtgtttgcttgctggttcctagggtgaaagctatccctgttattttcagttactgagactttagcagggaactaactatattgtttggagattgttaggtggctttgagcactgttgtgcttctgtggagaagcaatgttggcaaccagggagatggggatgcagatcgaagagctataggattagagctctcattagggaacatggtctttttatgtgtccagtggtagtgatgctttgggtctagtatattgagttgttagtgagagttccaggaactcactggtaaattcttggacaacacggagaaacgggagcataaatgattgtctactgacaggaaagccttacccacagcccccatctgttctgagatggcgtctgcatattcttgccctcatccattccaactgggcattgtatacaccatgcttggttaaactcagagtacaatagtgtagagcttgtgggaaaagcagaaggaaggggacccgccgctagatgagctgtttaggagctatgcgtagtgcccttagcccatacatgaataaaagggaaagcaattagacaatagtcataaagaagtccagctcagtgcagattcccccatgataatgacttcaatatgattttggaaatattagataactcattatgtgctatttacacactgatttgcatgctcagactttctggtgtcttgcagatgacctgagagggagcatctaaaaatcctctggcagaggaggggacactttgagcttctataagtaggtgtgttggctgacaagaagttcaattgtttgcacagctggcattaagggtttttgataatgtgttgagcctcttagaagaaaagccctgcttaaatcaaaggagctccataaactaataaaccttgtatttcttttaatgagtcagggagcaaaatattcctcatagggatttactacatgaatgagtgtgtgtgtgtggttttttttttactctattaccttgcccattggattgctgaaatggtttgctcatggcctctgataattaagtgcctttcggatgtacgtctgccagcagcatcttgatagttcacctgtgccagtcccctgctgcactgttaagttccaggcaaatgtgctctctcaggaggagtcacttgtctgatgtttctctataggtccagcgacttgcaagccactgcttctcaagtgctggcctgtacaagcctcaggatatatggctgcttttagtgctatttgccatcattaagagcctgtccgagtggaaatgatgtctcatgataatcactccgcctacccgatgccaggttggaaaaaaagataattatgagcaagaatgcccaagaaaagtaccgactgccggatcccctaatcaatgaggggtccatctggaaacacaaatggaacaactttgattaaatatacaaactcgctgaccagatcagcaaaagggagaatggcagctttttattgaatgcttgcatgttttttttattactttgaaatgttcttgcatatgtttctcttggccccgaggagaagtaaaacgttgattagcacaattcaaagttataataagggctgacgattcagttgagatggctttcaagattagatgtgtaggtgaggggtaaatgcaaaactctatctctggaacattctgctgtagacctgctgggctttggaatctcagagagtaaaagtgatcatttattgagctgttattgtgcctcagtgactcatttggaattcctggattcagttgttactggaacaactttaggaggagtcagtgtcactcccattttacagatgggaaatcttaggataaagaatttatagtgttacgtggttggtgatagacctaggggtctgtctaggccttcttgcttcagagctcatcctgtcactcttggtttacatttattggttgatttcctaattttacaatgtggggttaagaacagactccttgtatccgaacctgagggggtagcctcttgactttcctttttcattttttcctccttttcaaaactgaagggagcatagccactgttggtcacacaccctttgtataggtcatagattgactcaatgacgttcgccacttgtatttgtagcaatttaagtcattgcaggattttatctttgacaattatttttatcagttttagcaacagcagcttggggagatggtgtttctgaacctgcagcttagtcctgttctgatgtctccctcagtgagccttctctcccatccctgtcacctccctgtcacctccctggagctactaaatgatttcatagccagccaagagggttgggtgctctgagtaactcctaaaggtagggaagactgaaagtagaagccaagggcgatgagggcatctcagggaaagaacctaagagatgagagaggtgcctggagagactgcagctacccagtgctgtgctattgcgagttgcttagctgtacatctttgggaactctgtgtctttacccctttaggaaggatgtgactctgtagcccattagagtcttctacactgctcagagtatcttgagacagtgctactactaatttaaatacactcaagggaatttagggtttttttcatatttattagtgtaggcaggcctcctttgttattcttgtttcttgctttacataagtaaactttcctggcaaatcaaaaccaaaagctacaattgataataaatggtgatggaatttgaattttcaatgagtatgcaaatacattaaagagacacatatcttgattctgacaacagagcctaatacatagatcatcaccagtaagtgattcaaataagaatgactcagaatactattttagtgactttttaaaaaaacttttctttaaggttacgtaaatacaaagaatacatttttcaactttaaaaaatgcaatcctcccccctccaagaaaaatatcagtggtttgcttaacatcagcatcacacttttggtttcacccatgttgatgtgtcagtttggttcagtttggttcttcagagaattctcaaagtttatatgactagagaatgtttcctcccagagtcccatctgtgtctggtttcctgctgttggaggtggatggctccgttgtctgcttcttagagcagtggtcctcaccctgaagctgtgaccctttaatatatttcttcgtatcagttttgttgctacttcataactgaaattttgctactgttaggaattgtaatgtaaatgtttttggcgttagatggtgggaactgtggctcccaccatgtgtgcccatgtgaggagattctgtcctgagatcacaacaaccatacacactttagttttactgggcaatgtcaacattttcccagaacagttgtgcgaatatacctctcacccggaggatacagaaattcctgttgctttggatactcgctgacacttgggttgtcggctatgtgcagtttctgttctctgtggtttattcattataccgttcatcattgctaagtctgatgtaatgtcttactgactaccagtgtttgtttttgtgatatacaacataattttattctgaaaaaaaaaaaaaaaacctggacaaaaaatccagaagaataacatcggaaacctaagggcagaggtaaaggcgctctcttaacttcttatccttggtaaacttctgggttgtttgcttgacctttggattgtcctgctcagcaaagtgtcagcttggtgattcagcagtcagatattttcttatcaatgcagtggttgtgacatttgtaggccttatgatgacgactgaccgtttcacgtttgcatatttgtggaacttaagatggatgtatgacaactggggggtgggaggacgggtcttacgctggaaattctgagtctctgcctgtggcgagagacaaggggtgagctgagctgatggctgaagtaactgagaacagagaactacgcttcagagaaagaggccttctcaggctgtctgccccggttaatctgtcagtgagtcaggcattatctcagaagccacatttccccctgggtttgaactttcagcatggctgagatcaaatgtttcttcagaagaaaggatgactgagatggtggtggtagagggtggacctcttggcacttctgaagatgtcagcttcttcttccatcttcactcctggggagagcttccccttgagtcactgctgcgcaggttgctggtggtcctcgcttcccaggaagctgctctggaataggcaagcactggccagaaggagcttggtaccagccattcctggggagctccacagcctttcactttgctctatttcagccacacttgagtggagtcccctgtggcgagtggcaattgaccagtgttcaccaactcctttcattgccaatacccctttgagaaactcttcgctctgttaacattcccagcctttgattctcctaagagtttggacataaagtggaatgtggtctgccattagaagtgacttctgtgactcctgtttggagcagacagagcaattcgattgctttcctgttctctgtagcctcagagtaagcttgtgacagtaaagagcttttgttgataaaagctaaaaattgcacccccaagccttacctttctgatgaggttggccactgctgtcaaatataaagatgtctgaacacattctgcagatgatcttcaatgcgttccaagtgacttgacatatagagttcataaaaacatccagagttttgtcagggtctggttctgacctgcctttagcaggattcacctcctgctatttttccatcaaaggtgccaggaaagcaaatgtctcgagctgtcaggcagtgtccgagcagagtgtgaacacgaaggctctcttcgtccaacccaacctgcccgctcttaagatagcttgagatggtgaaatgatgagagaaaatatggtgtgacttggattgttttctcttaattaccaaagataattattgtgaaaatattacaccagaggtaaattgtaccttaagttgtcaaaagaggaagaaagtaggtctctggttggattaattaatgtttatgttgaagaaaaaaaacgttctctgaattgaaactattcgggagatctatgatttcataataagtacatcaacattccagcttgttatgtgagccaagaacctgttcagtcatatatatatatattttatttgaacagagtttatcttagacataccaccatgtgagaggtccttatctctgaagtttgtcttgtgttaatgaagggacagttggaaatactttcccacttcagttctcaaggaaaagggattggacattttgctttgctgtgatggaaagatgagggatggacttgtgcagatgtcatctggtcttctgtgggacaggaatgccttatgtcgcagtgtcctgatgcaggacaactttagctggaacagaattgagggacatgctgcatttctcaggacagcgtcaggcaagctctttcctggctgtcagtctccattctaaagtgtaattttccactgaaactgctccttgatatatattttttttaattcttagtcacttctaatttctttctggaattcccagggccttgaggtatgctttctgttgttgttttcactatgggcgtgtgtgtttgtgtgtgttggagtcatgtgaaagggaaggaaggagtatcaaatgggatgtcctcattctgacacaggaaccagagatcccccaaatgtgccacaatgctaacagcagtctcaaagttgtctaacataggatttcaggttctaccaaatccactgcagggctgtgtgaccttctagggtatcagtctttgatatgccatggtctaggctgtcatcatttcaacatagctgtgccagggaagcaaatacactggtcactatatccaggccctccagagcctatttctattcatgtgtctttggtacttttatccatgtgtctttgacctcagtaaattatacacacacacacacacacacacacacacacacacacacacacacacacacagttggcctaacctatcagaagctagaagtataatcccctggtgtgcctagaaccaacccccttttttaatgtaagaatctgtgaaagagaaactgatgataagtgtattatcataatatttaatggtactatgttataatttgataatatatttgtcaaaaataatatttgagatgcttctgggatatataagtaactatgctaagtgagcagttgaatattgggagatggggagaaaaaaggatgtaaggaagtgagagataagggcaagtaggtagtctcgggcttttcctgtacagtgtgtgtgcgtgtgcgtgtgcgtgtgcgtgtgtgtgtgtgtgtgtgtgtgtgtgactgcctaaagagtctagaaaaattgaagccctacaaatgatttctatattagttaagcaaggctaagcactcagtgagtctgaatagccttcacctctggtgtctcacaggctcacccacgtccttgggacagtgtgaggccccaacacatcataacctccccatatggacagaaatgcagtctgttttgcccatgttagatccttggtacctgagaaaacatctggtaggaggtaacagtttataaatagcatattttgattcatctcctatatccatcttggatggctttatcaaatagtaaagtgaatcaggttttattgagtgtcattgaatgcctctagacacatgatcatcaccagagataagaaactggatttttaaaaaatcagcccctgaagttcccttgtcgggtctctagagagatggctcaatgattgtgagcaccggatgctcttccagaggactcaggttcacttctcagcaaccatgtcgcagatcacaactgtctataactccagttccagctggtactacatccttgcacagacatacatgcagataaaataccggtgcacataaaatataaacaaataagtaaacaaacaaacaaaccaaccaaccaaccaaccttgaaaggataaaagagtcctgtgtgttccatgcagactttcattgcctcagcagtcactgctgtgctttatagcaatggatttttttcccccacagttttctttaaatagaattatacaacatatagtcttttatgtctagcttctgttgttgattaacaaagtttttccattgagaccaggcagtaaatatttgaggcttgtatgcaatatggtctttgttgaaactgtcaactctgttgtctgcagtgcagatggtttcagacaatactgtactgtaggaaggtgtgctgccttgccttaccaattgtaagattctcagccaataaaaaaaagtagaaaagatgccttaacaagagaaaagcacaatgccttttatttaattaaagatttaatgatacaggagacttcaaaatgtggtcccaaagacctgcaagagagctatgtttatgctctgtttggtgagggctggacagctatgtagacatttgaatgggccagagagtctgctctgttggtaaaagactgagaggtaaaccagcaaggtctcttggccccttggtttcttttcatcctttctgaggtgtttcttcctattggataggacttcactaggatgggggcatttaaagatttaaaaaaattgggggaagagaatgacttttgtgggtgtaataacaaatttggagggcagcagttctagtatttataagaagtctccaggaaaaaaacaaaacaaaacagaaataaaagcctactttccatgagttttttttcaggggttgagactgaggttagacacaggcagtgggagagggtcagagaagtacactgttctgaagccccactttctccctttgctgatagtaatcagtctgggataatattttttgagccaagcaatctataacagagtcgatgtgactgtactctgtaccagtaaaacttcaattataaaaataggcagacgaccggatcccatagtgtgaactgtcaacacgcaccttagcagaaccgacttttaatactctatacattcataattcatcattttgagttgctgagttactgtccacggtgtgtacgccattctgcagtttgatgctgcactcatcctttgatgagcgtctgagaagtctctatgaataaaagtctacatgtcttggtgtagacacattttaaaaagtgaattttaaaaatgaattccaaatttgtttatcagcaatacatgaaaattccaagctgttgccattgtagtatatgtatactgattcaatatgtaaacattagtagaagtaaactatggaatgccagcacttgggaagcagaggcaggtggatttctgtgtttgaggccagcctggtctacagagtgagttccaagacagccagtgctacacagaggaaggaaggaaggaagaaaggaaggaaggaaggaaggaaggaaggaaggaaggaaggaaggaagagaaagaaagtcgtgaacgttttctgatgtcactgattctgttgactttttgatacttgttttattgtttttaattatgtgtggcataaccacatgatgccagtgtttgaaggcatgcgatcccttacacgggaacttgtatttttgtacaaataccctatccttaaatttttaagttgtcaataaaaattttctagtaacaaaactgcagtcaccagctttatggacagcaatgaagtcagtgcaaatacttaagtacacaagttcaggcaggacacagttattctgcactctctgaagatacttagattgcataggtcttgctagctggttgagctgagtattggttgaaatccctttgaaatttatgcaacctaatttgatcccatttctaatagatggctgctttacctcctttgaatacagcctgcaaataccataggcatatgctgattttttttttcctaaaaatctcacttgggtctactatgtccagagagttttgtgttctgtatgtatgagtgaattaatttttacttgaaaaatttttaagtagatgtttgaaatcttgaccatgtcttttttcccctccttcctcagtttcagtcagttttataaacttccactttaagctgggtaacttcccagtgaactctcttgtaccccagtgaattgatttgctatttatgttctttccaataataagctcattaaacgctgagacctactaccaaaaagtgattatttcagttttgagtgcttgttctggggctgtgttctgaagagctagatgtcaattaagattatttcttattagtggaaataaaatcatgttatctgcttataaaagaatctctctgttctttctctaggtgaggaggtaaattcagctcagacaaagttcatctactcattcagtgaagaagtgcaaagataggggttatggaaagagcctgttttatcacagtcgaaactagtctgagccttgaggtgttttggggtgtctttcctacagaactgtgtctctgaggtggtgttaagttgcaaattctatcacaacacttagaactgagtctttgttaagtatggaaatcccacacctgtccaaaatgggggagaggaaagnnnnnnnnnnnnnnnnnnnnnnnnnnnnnnnnnnnnnnnnnnnnnnnnnnnnnnnnnnnnnnnnnnnnnnnnnnnnnnnnnnnnnnnnnnnnnnnnnnnnnnnnnnnnnnnnnnnnnnnnnnnnnnnnnnnnnnnnnnnnnnnnnnnnnnnnnnnnnnnnnnnnnnnnnnnnnnnnnnnnnnnnnnnnnnnnnnnnnnnnnnnnnnnnnnnnnnnnnnnnnnnnnnnnnnnnnnnnnnnnnnnnnnnnnnnnnnnnnnnnnnnnnaggagaggagaggagaggaagagcatggttctgagcatggttacaacctgttagaattgtgttagaggactgactggttagccataaggatgtgcttggcctcctgtcggctttcctgagagtcaggttgattgttgctcactgtgctgtagtgggggctcatgcagtgcttgttcttgctttgggctaacactgatccatgtgctgtgcactagcttagaggaaatatcatgccatggctcggcctgggctttggagtggcacacctgctcactgctattctcagggaatccatttcttcactccgagagtgaggttgagggcagcacttgtgtcctctggctgttgtgtggacagagtgtgtaaatctgtgtgcactgctaacagtcagttacatagtgtgaatcctatcactgtcatcttaggattcatcagtgctcatcctacagaacctgtgagctaggtgccatggttttctccattttgcatttgagtaaaatcaggtgaagagatccattttctagaaggtggtaacactcaattagaagataggcagggagcactgaggcctgtcagccagtcctggatctaggaggagactgcgggggctctataattctctcctgaactattggctagtgagagatacccggagagggacagttattatcttcagttgtgtacccaacagtgagcctatcagacgtcactggatacacacagatggtcctagttaatgatgagggagtcaaaaataaaaccccaaataggacaacatgaaagtgggaaagggacctgtaaggtgacagaggggctgacagtgaggggaggcagagaagaccgtgtggagggggtatgagcgtaagctggatgcattatagacacctgtggaattgttgggcaggtcaattaaagatacagaaagaacagaatcatctagaaagcaagaaaggagggctcaaaagaaatcaaccagtttcatctcctagttcagatattggagctatgagaaaatacagtcctgttgtttaaaacaggaggaagataaaccgggtggtggtggtgcatgcttttaatcccagcacttgggaggcagaggcagggggatttctgagttcgaggccagcctggtctacaaagtgagttccagagcagccagagctatacagagaaaccctgtctcaaaaaaccaaaaaaaaaaaaaaaaaaaaaaaaaaccaaaaacaaacaaaaaacccaccaaaaaacccaaaaaacaaaaaaccaggaggaaggaggaagatgattatgggcaggaggaggaagaagaggaggagaatgagggagaggagaaggaggagggggaaggagagacaggttgagtccagtctatggctgttactggctgtcctttgcttttttgctgactgaggaggaaatggccatgcctttgcatgcaacctacagcagaacagcaacgtcactgggaagaggacagtgagacggaggtccttttttttaaaaaaaggatttatttatctgtttgtttgtttgtttatttatttttaaggatctatttatttcagacaactgtagctgtcttcagacacaccagaagagtgcacggatccctttacagatggttgtgagccactatgtgattgctgggaattgaactcaggacctctggaagagcaagtagccagtgttcttaaccactgagccatctcttcagcctgagagtgaggtcttatactaactgcttggacttgtccacaggttctccaagagagtccctgcccctgttgactctggtcatcatattgtcttaagagtccaagttctgtctggaatagtcccatctaggagaggacacaactatttgtactcttatgaaagctggatgctgggcttccatcaactgtagcatctccctcctccacaagtctgggagaaccaccttttgtttccctggatacagaattcactgttattggccattgtgtaaaacctcctcaaagaatgtctatctgtgcacaccaacaatcggcttaggttaaatcatctctgggtacttataaatcttagtacagtgtgtgtgtgtgtgtgtgtgtgtgtgtgtatctcatataatcagctgctgtattctatttttgaacacttgtaattaaaatatagtttcagcttccagttgttaaaatcatgagtggagagctcacatgtgtgagcagcagggaactgtgttttctgtttgatctttcctgagagaatttctgatagcttctgcacaaagcagggtaaccacaatacttttagccctcactgaacctagagtatagtagggcagaaggactaaacaggtcctaatgggccatgtctagcctctgtcttcttgttgggatggcctgttacaggagagtgcatggcactgtgggaagctggagggacataactgaggaagttgagccatttgagtggggcaggtcccctctgcatgtgctacttctgcgggtattcagttgcatctggctcaagacacttcatggggaaggaaggatctagaacaagttgagtccaggtcatgtgtcttagtcagggtttctattcctgcacaaacatcatgaccaagaagcaagttggggaggaatttattgtaagtttattcagcttacactttcatactgctgttcatcactgaggaagtcagactggaactcaagcaggtcaggaagcaggagctgatgtagaggccattgagggatgttctttactggcttgcttcccctggcttgctcagcctgcttttttatagaaccaagactaccaggccagagatggcaccacccacaagggaactccccacttgatcactaattgagaaaatgccttacagttggatctcatggaggcatttccttaactgaagctcttttctcggtgataactccagctgtgtcaagttgacacaaaaaccagccagtacatcatgtctcttacaggaagaaagtcaacctggggtacttagttctgaactagtagagaaaattggcctcatgttctatcatgtcgctgtccaggcaatactgcaagggcagctggtcctcctggaatcttacctgtaatagccaccctccaattttccccatgcacagctttctcctagaacattctgcattctttaaaacccagaagaaatgctctccgaatctaacaaacccttcctggatgtcggtgaagccagccttcctggtcgtaggtgtcatgtctgagtctgatgtggttcttttgagtaggatggttcccaggccatgatgcctctgtgcacccctattagatgacattaccggtgtgttgtccgggttacaatcattcaggttccccgtggctggtaataagaacagcaggcaggtgctactctcgttgctttataaatatttcatcttcatagcagtctcatgagagagatgccttctctcaccctctgatgggccacggtggacacaccaataaaaacaaggagagaaaaatgagacatttgttttgtcaaagttctgtgtgtcaggaaatttcagaaatatagacccaaagacaaaggaaagcttgtggtgtagcttcatggaggatggacagctttcaaaatgcgacggaggaagaccatttgccttgctggtgatggatggacagggtccagcagaactctccagcgtctccttaccttcccctgcagcactcctggtttaaggaagtccccgtctggaatgatggttttactggccagttgtcaacctgacacaggcctgagaaaagctaaacctcttttgaggaattgattcccatcagattgacccatgggcttgcctgtgaggcatttcgttgattaatgagagaggctgcccttctgctggaatgtacaagaagacaggctgagcaagctgtggagagcaagctgtgtttctccatgaagactgcttcagtccccacttccagaaactgccttgacttccctgataatgaactgtcattttgaagtgtaagatgaactaaaccctttccttgccaggttacttttggtcaggtaattattatcccaggtgcaagaagcaaacaaagagaattggccctaggaagaaaggagaagggagaggatgactttccaggattgcgtctgtaggtttgatggagacagtccttgagtctatgacttgctgagagaaaacaatgcctggtttctatggcctgcttccgggaataaaggaagcagaaaaagaagagcaggtcacagaggaccactgaccttcagatcgaagtcccaggctgcagagtaacaacaggcttgggctgtgttttgcactaacacccaggccactctctgaccctggataaacctgtacctaggtggggaatgaaggtcaaaggacggagggaaggaagtggtgaggaatagtgcctgtggactgtcagaataccttgctgctgaggcccactattttgtgtggaggagctagccagcactgtgtggtagtgagtcctccccaccactcgatgcaaacaactttccgaggcaggctggccctagagttctgtgtggctggctgaggtggagaacaacgaagggaggcttttttttctgtttgtttttgatcagcaggtttggaaactttgagtgcttggctgagagctggtggaaagactgcagtgtttcctgtggccgtcagtctggcttctgagatagggaattggaccttggctctgcctcttgcagggggatgtgtgcagtcactgagggacaggccttgcggggaggagggaagcagaggcgttacagccgaggaaaaggactttgaaaagcaaatatcccaaaaagcagagcaagggaggaagtctgtgcattagtttgcaaaataatgaactttccagtagaaatgctgattcccaaagcccggagcccagagtgaggggaagagacccagcaggctctccagtctcatcctgttttccattgaatttcttcttcaggaggaaaagagtctggaataggcctctctgagccttgagctgctggctccctttctgtttctatccaaggagacaacctaatagctgttgtataaaaaaaaaatgctggagatttcctggattttaaaaacaaaccattgacttgagtttaaaaaaaaaaaaaactctctgcatttatatttaaggagcaagtgattcattcatgtattcgtttgcctggaaaattttgagctgttctgagccatggcatctggggcagcctggacctgcaaaggtgaagagaaagagtttcttctactctcctccctttgagcaactggtgtaaactaatagagccaggccagagaagagctctggtattgtggtccttccaagcacccaagaacatgtcttttggcagtttctaccttcaagggctctgaagtctactttctgtgggaagctgctgtgcggtgctggctgggatttcttgaaacagatgcagggaaaaaggaagaggaaacaggcagcctcagaacacagcagccattggtgtggaaagagccgacaaggaaaaaccaacctggtacttgttgttttggacccccagttcagggactaaggtatattttgcaatatcaaagcagacctggccttcaggttctcccagcatcctttagtccctacctggcacaccctgtccccagctcagaactttccagcccagggggttcccccagagaaggattcttctttctcctttctgtctctgtctctctgtctgtctgtctgtctgtctgtctctgtttctttttctccctctctccctctccctcctctgttttccccatggtgactcccctagcctcaatcctcaaagccagtgaactcactcaccctatagcagcttcctgataaactagcctttagtctagtctaatctatcagtggagacataacctatcagtacataggactagcaaatctttgacgttcatagagttggggaacaggatggttacttgaaagcagggtgtgaaaagttttatgtccaaacctgaattcacatttagacaatcaaggctggaagtgagatgctcagattcaagtaaaccacaaataaaagtattcgggtctgtctgtttgtctggtttagtccgtctggttcattttatctcatgccaatgtatagcccagaagctgtagttaactgtattagactgtattgtgtgaattggaagccattacacagaagctttggaaggctttcctggagacagtgtctctaccgggtgatgatgattcagtatggagttaggaaaagtttcctgccatgttccattaacttctgccctaatctattcagcagttctccttctcttgagaacctgaggagacaacctgaatttcttatttcctaatatcccatgcatagccagtgccataagatgatggtctgtggaggaaaaattttgggcagatacatttgcaaatatgtatattggctgtggaaagttcccagtacacatgtgttaagagtctcaagaagtcccgcagtgaagcctgctgtattagtcagggatctctagagtcacagaacttatggacagtctctagatagtaaaggaatttattgatgacttacagtcagcagcccaattcccaacaattgttcagtcgcagctgtgaatggaagtccaaggatctagcagttactcagtctcacgcagcaagcaggcgaaggagcaagagctagagctagactcccttcttccaatgtccttatattgtctccagcagaaggtgtagcccagattaaaggtgtgttccttaaactcggagattcaatcttctggaatccatagccactatggctcaagatcttcaaaccaagatccatataaggatctccaagcctccagataagggtcactggtgagccttccaattccggattgttgttcattccaaatattgtcaagttgacaaccaggaatagccactacacctgctttttaaaagaatgctccagaaagtgtatcatgggttgctgtttcaggcaggtgtagcctgtcttctgatgtatgtggatgtgaggcataggacatgttgcttggcctgtaatggtacttatttcagaccactgtttggaagggtatatagtgtataccacagttattagtagctactatttgattccatgttttccaagacgcttgactctctccccttcctctttttcttcttccattacttaatatctcagagaagtcatgttgtgtgagagatgctgaagagagaccagttccagaagtgagcttgcagtcccagagtggaaaacagctcctaaggcctgaggacgaggtggtatagaaatcccacaattggaggaccagagtctattaccaccgagtggcaaacattagttgtataagtggactgtgttttatgccagccatctaatgacaaaataaaaactcagggcaggaaacaagtgtgataagaaccatggatcaggagtctttcaattccaagcaacagaacctgtgttcaaattcacagaaaacaagaaaattcatttgttcctgcgtctaggaagggaatttaggttggcaaagtgatagaaactagaaggttggcagctaggaccttgccctcccatcttcttgccatccctccctccattggcttttgcccttcttgcctctttttcttctttcaaggttttaccacacatgaagggcacagatctgcagacagttttagcttcccaggcttggggaagagagagagagagagagagagagagagagagagagcaagcttttttcttacacttcttgggcagtcaccaaaaccagacttgtttgggtcccatttgtatttggtgccagtcactggtgtcagagatggggctcacagacgtggtcaggcagtagcagctggtgtgggcctactaccctaaagaagccttagagaagttggatgaacagagttccctacagctgtgagtgacagaattgagttagcttactgtcctcacatgaagtgcaggtgttcacggtttcccgttgaattcattttcctattggcttttagcagcttgaaacagaccactgtatttcttcaacaaattctcacttcacatctcctctcctttttatacacttgagactattaatgtccactttttttttgttttttgttttttgttttgttttgttgttgtttttcaagacagggtttctctgtatagctctggctgtcctggaactcactttgtagaccaggctggcctcgaactcagaaatcctcctgcctctgcctcccgagtgcagggattaaaggcctgcgccaccacgcccgactctaatgttcacttgtaaggcgagtctgtataatgagtgtgctcaaaagtgagattagaatcaacctcctttagggtcccagtccctagtcaggggagtctcatggacatgcccatcccccaggggcagttggttatgcctgaacattttgttatgtcttgacctggaggttctctggggagcagaggctgaggacactgtcagtagcttgcagtgcaccacttcctcaagtatcatttggtcccaaatgcctgcggggccttggttgtgaagcacttgctcgtgatttttattcccccttgagtgtcagagtgtatacatagagggaggaatggacctcacttggctgggtgctttctgcgctccgagtttcacccccagcactgctcaaaagctgcacacagagagaggtatatgctcgtaagcaggaggctcagcagttcagggccgttcttggctacatagtgaatttaagtcagttgggctgcatgagaacttacatgtaaattaattatcatgtgaacatgatttttttttacatttttaccaatcaattaactttaaaaatcaatatgattgtcaaacatgctttatgattttaattctcatccctttattatgtcttctgtgtatctattactcatgaatctcctgttctcgagattgtgttgctcattttcctcagacaagtgtctccctaataacaacctcaggagaaatggctgtagaggacagtgagggcaggttgggtgctatttgttctgactattttctcagcttgtcactgtaggtaagcgtccacagcggtttttgagtgcagaactcttttgtcttctttctgtgaagccattacttaatgtcctgcagttcttgaggataaagttctaggatacaatgtccttagagctgactccttctgaggcctcctgcattggcttccagcctcacatgctttgtcctgtgtgcctgctgccactgtcctcattcttgtcagggcagcagccatgctaggtcaaagctctcattcttcactccatctttggttctgaagccctgtcttcacttccagtcacattctgaggtcttggggggttagaccttaatcagaggaaccagcatggagggttcacaggtactactgaagagtcttcctcacagtgtggaaacctttggaaaaatgatttaaacttaacaagattgagtgttaacatatttagagcaaataactccttccatcacacagttatgacaaagagtaaatataagaatgtacccagcctttgcctccttggagtttgtccctgtcctgacacctgtcctatgccactcatggtgacacgtgaaggaagatgttggaaggaagatcttctgtccaggtttccaacatgttgtatggcaatgagagtaaataacacatttcttgtcatggcaagtagatagccctgataattactaaaattactggccatggtgtttgtcagcagcatttacataaaataaaacatcaagttcattgattcagtttctccttttgctcattttcttttggttgttttcatattctgctgtgttccctggtctctaaggctctctagtcctttcttctgtttttttttttttaaccatctggggcctaagtattaccaccaggtcccaggtaacaatagaatcaatctgtagactcagcctccattgtatgtggttcattggagctctccagtgtagggagatacatattcttctcttgttctcatggacttccatggcagacattgtccatctatttgatcttggacttccatggcagacattgtccatctatttgatttatcaaaaagaatgtcctttgtgaacacatttcagaagaaaaacaaaggcaggactcagcaattctgggaatcacagccctgactccggctaggtgatagactgtccccatggcttcattatatcatggcattactgcatccctgcatcacagcatcactatgtcactccatcactgtaccaccaggtcactgtatcattgcatcactgtatcacagcatcactatatcactaaattactgcaccttggtatcacagtatcattgcatcactgtacctatgcgtcattgcattgttgtacagtagagatgttgctagtcagacagttcctagaactgtgacaactgcaggagccaaacaatttatgaagcaaaacttttcttcttttaattttgactcatagttttggagatttcagcacacagtcagttggctctgttgtttctatgctattgtgaggcagaacatcatggtggagcaaaattgctcacactgtgaaagtcagagtgcgagaagagagaaaggaatgggaggggctagtgagtgggaaggagactagctatggccttcataagtataaccttctaagtcacgcctctagtcacctaattcctcttcctaggccccacttcttcctaacatctccccaaattgtgacaccaactggggactgtgctcctagcactgaagtctgtggttatttaatccgtagcagacaatgagatgctatcggtctgtttggaatagtgtggtagagcacctggaacagagctctatccaccctagcctgtctgcgcaggccttcttgaggtacaatgcccacagaaagccgtaacctcagacgtgaaaactggagaggtccagaaaaatggaacaggcctcagggtgacctgagactactttcagtggaagttccttcctcttagcacagtccaaggcaaagagaaaagggaaccagtcaacattttaaaaacaagcttagtagctccgcccctctgtccccataggcattgtcccatcctcagaaataatgtccaggagtaggtcagaggaaaggaaagaagggttcaggggagacctgctgctgcttcgaggttctgtcccactgctccaacctggcctcccctgtgtggttctttcacagcaatgaattgaaagcaagacagacgtctagtaagggccggagtgatttctgtctcttgtcttagaaacatgactcaagaaaactttcattgataggatggaccaaccagagccgtgtgcatccaagatgtaggcgttagtaagctgactttctagtgagacagatctcctctatcacatacacgcaagtataagcaaacaattgaatgtctgtattaaggtcacagactcttagtatgccacatggaattatgtggagccagaaggcaagcagggtcactttagaactctccacccactccaagctgcctccagagatttatagttaccttggaaggcgtggttagggtgtctagccaactgccaaggctgcttcctctattgtttctgccctcagtgatcctcagatttcagtctcagtgagaattattataccagactgtccatgctgattgcattaacggggcaatgtcaggaaacctgtacagtccttgggagatgtggggtgtgataaacttagttttccttttgttcggagctctcatgaagggttagtcatctgacagccattattgaaaatgctggccctgggagtgtaactgcacatgggatgagtcttcctttagggtgttcctgtatattccctgagtgttacactaggggaagcaaaaggtaccaggcgaacaaacttgtccagaaaagacttaaaagtatattttcttcttcttcttcttcttttttttttcctttgtttttttgagacaggatttctctggatagccctggctgtcctggaactcacttcttagaccaggctggccgcgaattcagaaatctgcctgcctgtgcctcccgagtgctaggactaaaggtgtgtgccaccactcctggctttcaaagtatatttctatctgttatgactgaccaaaaattgagtcagtctggtttatgtgttgatagttgcttcagagacaagaagggcattcacctgtgtagctccagtggcacggccctgaccattagtgatctccccagagtgtgtgctgcctcaggacctctcagtgaggagaggtcagagatgctgtccaccctgttacagtgcatagggtggaggtctggcagaggtctcatctttctcaagtggcagccaaagctactgagataggagcagcagagactgtattcaaggccaggatgaggtcctctgaggatggaaaagagggaaggattgctcattctgcaactgtgctccctgcctgctctgcagttgtcactacagggagagcccatgaggcctagctggcctgggaaggaagccagggaagtcctggcttccccctgtcaatggctgctttgtgctgctggcctcctgctctcaaggggagacactggagagcctgcctttgtgttctcacctgctcagcaggttttcctcccagaaagaaagaccagttgaagtgggaagaaaacaagagcggcctttgatttctggaaggttaagtcccttctttcttaattgtagactgtttctcgtggaggggcgggaccgagggctgttcaatgcagttttctttctgtgatctattctcttgatcaccagggttgggtgtttgttgacttgaatccagttacctgatacgcacacagcctgtgttcatggcagacagagcttcttccgttcttttcattctaggccatatatttggctgtggatctcttgggttgaagtgatttggtactgatagggtttgtgttgtgagtgtcctcgggtattcaagcagggcggagaccatgcagagccagccccatccttagcttactttggtgcagaatggggagctggagttattttataaggtcatattgttttcagctttgagcggttttaaacacaaggaagacttagtattgttttaataatcatgtcttcaggatatcatcctagaagaattaaacttactggaacataatgcaagccatcagggcttttaacacagctggctgaaggccttctaaacagctgtacaggaacaggtacttcttgcctggagagtgtgggcaaggaaccaactgctccctgatgctttctctttcttcttttgcctcttcttaattggcttcagggtcttgcttattttaagactattccaggaatgtttctgcctcagagcttctacacttactctttccctagtccatggagcgatttctcagctctccacagggcctgctgtctatcacatttctcccaggtctttactcagcctccacaggctcagtcaggctttctctgcacagtttttttttttttgcaatcgaggtccctttatctatgccacccccaaatcagcaacaccagcctgcaccgatgagccccaacccactttattcttcttgtcccttgctggcatctaacacccaggtctgcacctgtgttctcagcacacaaagcaagcctggcacccaaaggagggcagtaatgatttgtggatgaaagatgaaaccactgctttgtgggtttgtccttgctgggcgccactgattagcacaacagggttgctaatcatccttagccaggagcaatagctttgtttgggtttagttcatttcctggccagctccaccgcagctagttatccacacaactgccggtatcactgaggtgtccccattaacactgccatgcctgtgatgctcactggccatggaaatcgggatagaaagggacaaaaatctatgctggtcaggtaaagaatgaaagaagtgttatagattttgttcctgagagaaaagggcccacgatctacagaaacgggcagtgtctaaggaaggggacatgtgactttccattattatgtttagcaatgagaagaatacaaactaaaaagtgcactgaggtgtgggttttcagcctgccaagctttttcaggctgggactcactccatctgttggtgaggctgtgtgcaagcaggctgccgcaggctttgctagaaggagggcacgggcacgtaggtggagccttaaggagggactttggagatgcctatcaaactttaaacagtatgttctctttgacccaacaagtttacttttttgattctattgtaggcattaacctttacaggtgaagaaattatataagcataactttatgccttgcaagtctggtttgtaataccaaaggcaagaaagaaatcatggaagcaccccacagcagggacctggctcatcagggaggtcacaccctggtgaccagctgtgaaaagaatgagtgtgcgccagcactgtaccatacagaggcctagaagagacactaagttatgaagggtacagggttctgcttttgtataaagaaagggggaaaagtcagaatatatttttgtttttgttttccatccatgagggtgttcagaaggagagcattaagagccaatcacaccacagctgtaggttagaggaaaggcctgatgggtggggtgacattcgggaagtaaccacattgcagatccgggcgctgcaccttttgaattgagttgtcagtaagctaacggaatggagaggcaggggaggaaaatcagaacttcttttgtgagagaagggaaggctctcctgaaagctcccaggcctcgtggatattctcccactggaagactggccgtggggagggagtgtgagcacgtgtgaactcctggggaatttctccttcctcatgatatcctggttgctatagtgcagatctatttgtaacacacagaaaatgctttaaataaaagctacttcctgaccatgacttcctgggcaatgtgttcttccggagactgttgaacgccaaagtttacaagcagtctgagcgcgaaccctgcccattcaggtcggagcaccattgggagcagggttccatcctgtggtcagggggttgctgtgctcctgaaaaaaaaaaaaagaaagaaagaaagaaaagaaaaggagaaaaaagatgcaggaagccgaactcccagggcagagtctgctggaggctttgcctccagtgcttaagtgtagcctccatctttctttggggacccagggcgcggttggctgtgccgctgtggcttcattctctggggcgccaaggggagcatttctcatacaccagtgaaaacaggaagtgatgatgaagctagtttgccttgcatctgcgctgaactactttctttttgtcattcttcattaggtttagacacgtgtgccggtccacgcggtaggacccccgtttctacctgctttgtacttcctccagtcacacaatgccgccgccttcggacatcgtgaaggtggccatagaatggcctggcgcctaccctaaactcatggagattgaccaggtgagtaaggcaggtaggactggagagctcacaacagttttcttcttcgcactgagtggttgcagattttgaatagcttcatgtccttactctaaggggctctgaaatccgggcagtacttactacagtgtggtctgtgtatatacaatggcagtggatgggacttttatagtcttgccccatctgctggattctgtcaatactgggttcctatctgaagcagtagtgatagcagctggagggattgggttctgagcatcaggacagatggactgtcccatcctactgctgggactcgtgacggagcagatttttatatgggcaatgtaaaacttactttaaaaaaacatctatttatctccagaagaaccaacaagtgttttgttatattaacaactttataataaaattagtacagaccacattatctggaatatggtacagagtcagaaaatatgtaatgaatataaagggagattcatctaagaatcatgtcgtctgtgggtatggatgattggcggtcatgtgacctggttctgactctgattacagattgtccagggaatttgctttgttctcatttcactgaggtcattctagaacaagtgattggagggaagaaggacgagacttaatttatacttacagggttcaagaggtatagtggcattctatactttcaattagaataccatggcaacgccagccattatactcttgatactattttataattatagtcacagttctttttctggtcggattttattatcaggttgaagatcaccggccagagttacatggcattgtgtagattcaaaggagtaatctaaacaaaccctacaggtcagatcagaataattgggcttaaatctgcatgtaagaaaggttacattgtgcagaccgtgaaagagtgaccatcacaccagcatctcactgtcattttcactcaatggagaaacaactcttacaagtaaagcctgcaccatagctttgtgcaggtgtcaggcagccagcactcatgcttcagccagcactcacacttcttcacacgaggggcccaggaccacttacattttgcctttaaagagattatctagtgatatttgtcatagactgaatgtggttgggattaggtgtggtgtgtccaaaagaatgacaaccaaggtaaaagtggtccctcagtcacagcagtcctgtgctctgcagaggactggggcacggtccattctgtctctttggtttgctttatcagcattcagggttcaggaacagatgcctgggccttagaaatgcagattctcaggcctttcctagactgctgacccagatatgcatgatgacaagattcccagggtatccccgtgtacaactaagtgacaagtggcacccaagccagggtgcacattagagtcactgtcaccgtcagtttattcgaagagagtctcatttcctggttctgatgaactatttaattttggtttaatcatgattggtggaatttatggcttctctgttaaggcagccttagattcatattccagatgcctggggagtcaatagaatgttctctgctctggggatggccttctctgtgtatgggagtttcaacaatttaaaaagaaaataatctttgtactttggaacaattttagatttatagaaaactgcaaagactctatgcgtttccattgattcccttatattttgtattccctaactctaacattgttgcacaattttagaccagatgcttgctccataatcacattaaatacagtattagtccatatttatatctcatcatttgtttcagtaaagtcatttatagccatttttctatgatgtctaaaagcccaccccaaatcatctacaacatttattattatacctcttttgtctccattgtccgaaatacttctttagccatttctggcagttattttatggaaagcacttcagcttggggttccctggtacattctgtctagtagatttgaattttgcattttgagataaagtaccagggaaatggtgccatgtcctcttcagggagacacatcagggaactctcccatgactttctttcattcttgttcgttattccagtgccatggacgagaacatgggcattcagagaagtcatgttacctgtcagttagtgagaaggctgggtcaggactgggggcttcctttcctctcaagatttaaattttagatggttgtctgaattccagtcctcgtggcaattccacactgaggcagacaaagaatgaggaagccaggctcttcctgcctgggaggacttacagtagccccacagcaacactgcagtcagatcttgtttcctgatacaatgcaaacttggcatgagacttggaaacatactttcacatgcactgaatacttgaaatgatgactagcaggagtttcccctggtctgctgcatcattcagtaaggctcctactgtctgcctgccccttgcacacttgttagcagaaatgttggaaagcgcattgcttcctttaaacccagataactactatttcactcacagctttttggtaaaggttgggttaggcattgctgttttggggcctcccgccttcatgctgccatcgtctcaactctgagtaggtgtccttgaaccttgtgctggaattgtgcaggaagtttacccagagtatacaatgctgagctgcagagaattttattctgtcaacaagggcagggatgcacttaacataataagcaccagtgactaggagtgaacttgcacttaaaggctgtttctccaatgtcttgtgaccactctgtccttgatagatggacacttcgccagtgaatcgtggtggaggggcttctgctgtggtagttatctgggctccactctacccagctgtcctctaatggcacctgttcccaaggacatctgcttgctcactgtggacttgtttacattccttcaaagtcttgagcagattccttttgtgtttttttctgctcaacaggaagactcgctaggatcttctcgtgaatggacttttgctgcaccagatggcacattccaaagtcatcctctctcttggtccagtacttgaccctgttccagccaggctgtgtagggctaaagagggtggtcttcaagatggcagaagccagagtgctgccacactttctgttttagttatctttcccctagtaaatactgcataactgtggagtctgagcatctggccagaggttcttcctgagtggcagtgccagtgtagagggtggtggggtgagggtgggggtgggaatggtgtgcagtagagatgtgtgttgtgtttgctggggcagagcaggagtactgactcctggcaaggatctttggttggaatttcagctacagtaacaaagtactttagatggaataataaacagatcttgttcttcccatatttggagactgggagttgaagatcaagccaccaaggttgaggatctggtaggatctgcagttaccaaaggtttgcttccatggcccatggtacaggctgactctctgggtcacagtgtaaggatggctttcctgacttagtcacctatcaaaggctccactgccctgtcccaccaccagaggcttagtttcagctcagactgagaacacacacattccaagctatgctatcttagggtcctggtttctggactagctcagtttctgacattgagatttgaaaacctgccttgtgaaaggttctctgtctctctgtctgtctctctctccaacctgtcttccttttccaggagagacagaagaggggctggcctttcagcctattccagcccagtccatctcttgtggttcttagcagcctttctttgaaaggctttggccccatccagtgctgctccctttacagactcttttctccgacaacaagattcttactgttggaaattgtcctgttggaactctgatcagccattcccttacagttcctctactctcatacttgcatggatgctttcagcatattagctatgatgtcatggtgccttctgtgggtgaacagcactttcctttcctatggagctggccttgctgatatactatctactagcttcagtccagtggtcttccctcagcctcatttcccctgtaatactacacagaatactcctacagccctatcctcagacatcagtcagtcctgtgagacttcttcattccttggttattctggatgaagtttcctccttgatcctagtctacttctgtccagatcttttctatcctcagccttatggtttgtgcactcaccgtggatgggaaattttgatcttaattccatgatctcccagatgttaaatatgatccctgtctatgtgatacctgctcccatgaccagtgtggggtattatctggcatcactttcaaatctctgtgtgttggaggcatggttttccatatataaactactcttacctactcttacctttaaaaggcatacagatggttggtggtattctacacttgtaaagaaaatggtctcaggggatcaaatatagtccagtggatgggccgtatactttgtacaaggagactatttgcatgtcagacaaagggccagtcatcttcactatgtgtgttagggaactgctgatcaagtcccagagggtgatgatgtttgacaacttttcctggggagacataatacacactcactacagattggtagcccatggtagacccaacttggtgaacattattattagagctagttacacaaacacgagtgaagggttgcttacagaagcagagatgactcaaagacagctgcatgaacacagccaatgtcagcatgggtaacagcttataaaggctagaaatctgaccctcactacacagcatgaaggcagcccagcaggttgaagagtgttctcttctggtgtctcagttcttctgagcatcccccaggcagctgctctgctggtcattgtttcttctaggcagtttggcctgttgttttctccaggctgctaggcttggctccctgttttctttgtagctagggtgttctgagagaactctcaagcagtctttactgtttcctcttgaggagggaggagcctagtgaatctggtcagtttcaggcacttcctgaaagtattttgagttgtttactacttcctgtcttaagaagcttccctttaggctggatacccaacagaaggaaagatgtccttggcttccagacttaatttggcaggttcataattggttcctggattttcagggcctccttgctcattcctgtcagagtgaatttgtattaggtcatttttctgttctgaggattgagagaaggattttgtttgagaacagtgaaatatcctaaaggaaaaaaaaaagattatgaatgattatgattatgggattttctagtgattctcagtctcaaatcaatatcctcagcatagctagcttcatagcctcctgtcatttcctcccattgatctgtgtctgaggcatctgtccttctcaagtcccctcctgcttcctaagtgcagattctttagtatgtccctgcgtggtcataggcttcctcatttctccagtgtccctccagccgtttacggctctgaaaccctcccagtgtgttaccttgcctgcctctgctgggaaccttagctcccactgagctctgcctccttacccagctcttttcttagcacattgtcatacagtctttttcccagcctttcattttttgagccatttttactgcctgctgtttttatttgcagttaataaattctgtatgcaatgtaatttacatttctcttgtgaaattgattagaagctcctagtggtcagcctgtggcctggggcctagtacactgatctcttttgtctgtgtgtataccttggacatgaattttcaacagctaagataagaataaagttttgatcgttttcatttgtcacattttaaagaacacctttccatatattgatggcaagtttgtttccccagaagaaacacagatatatgtgttttttgggtaaccatgtatacactgcctgtgtttttttccccagttatcatgtttttgtagtatgtttaaggtataattcagcaggtgaaaatgtgagttagattagactttttaaaagagcattaattgagtaaagtgcattcagagtttggcatttcagggttttgtgggtcattcccgtaacagtagcaacaggaataataatggctgccatctagtcaacatatactgtgccaggcagcatacatgctctgtgcatcgagttttgtcagattcctacagccctaaagttccacaaaggtgtcctttttcataattattcacaggcccatccgctgggcccccaggaggaattctgctaggaaggtgctgcattgaatccagcactgttggagaagctgtgcaggcaggcattagtaaatctaggtctctctgttggctggttctgctatcgcctctccatctattgtgttcctccttagtgattcttcccagtgacggcagtctggtttgaacgaaaacacacaccatcataggtgtgcctgctccatggctatcactgacatcttcaggaacgtgttgagtgaagagagccaagactccattttcttaaaaaccacaggtgatctgccccccgggccatgcaagccctacaggctcagacaggctagcatgcaggaggtgggtgggctcctgggcaacagattagcagggcgcttaaaatatggacttggtggagactgattggactaaataagttagcatttcccttgggtattaccaggagagggttccaattttgtaaggaagaattggcagtattcctaagtcctttcttgcttacatggctctgtgagggaaacattctgctctctgcctaatgatgccaccactattagcagccagatctcattctcctgttatacagaatagaaggagcatctcatgttttaggcaaatctcaaaccaataatcaaaatttctccttgaatacattaaaccagatcttcagctcgggaagctgcaaatctcaaggtgtttaaacattgattgtttggtcaaaagcaaccgatagataccaagctccaaataaaaacagctgaattcagatgaggctcttaagataatgtaagatgagaaaaatcaagacagaattgtgacagaacttctttgtaaccttgcagtgtttctctctagctcctgggttagatgcttacctctggtgctttgagcctgatgatgcttatttttggggctgccctgtatctcctggcactttaaggacatcctagctttcctcattagctgccagtatcacctctctagcagtgtgatgagcagaagtgtctagacattgccaaatattcctcgggcaggggataaaatatctatcctcctgttcaaaatgaaccagatgagagatccctagcttggctttgcattaggattgctcgggagccattgaaaatacaaagaggatggatgagtggtttgggtccatggattactgtttttatccatctcccttgggggatgatctcatggtttgtgttgcatttgggaaacactgttgtgagggctgggcatttactggctctgctgcaatgtgtctggctcccacagtaaatttcaatgcctcccttaaagcagatgatctatttctgcatcaataacagtgtcctaataattctgggcctctccttgctttatgcagtaaagtaaggagtacaaacatgacaccctcaaacactctcttaacctcaggtgggaagtgtgtgataagccagtgatactacagtaggctttttctggaatgctgctggtgggggaagtcatccctcctctgatggttgcaatgcttcagtttggtaatgtagcagctatttcttaaacttcctttaaaataatgtgattgtggtagttccttttctgggtctctctctttctctctctctctctctctctctctctctctctctctctctcatagggtagtctatagaactacatatgatagaatattacatgaataggaaaagaaaagcaactagtgtatttctcccctcaactgagtttaacaattgttggaaccaggagtgaaccctggcttccaagccgttcttttttttgaagaaaaccatatgatttgcacgctcgctggttggtgtggggttattctgcagccggcctcctccatagaatctatgcttaatgaagtttgggcaactcagggcagagttttgagtcaatagtattcgactgaaacttcgtgagtaaagctttcttaatttctgcaacgttttgtatgtgtcatgccttgtgttttgtttttaataaatcagctagagattagtgtgtgatgagacacacacagacacagatcagtttgtgcgtgtgcatgcacacacacacacacacacacactcacttcagtatgaaggaccctgtgtcctcagaatgatgacctttcactttataagtaaagacagcttctgactgaggtaaagtgtgtccagagctctggggaggagaagacagtcatgggaatggaacacctgcttgctcttttttatatctagcaaccattcagttgctaagtgtgtcctttcagtcattgctgtctctatcatggtgacaactccttgcatctcccacacttcctcaaagaaatcagtgctggaaagtctcccttctgaatggctcaggactctgcctatgttggacactgtcctttctgtggcttctagaatccgtgtccttatcccttatatggactttgccagcctttgtagggccacagtggcttatgtctgtcatcatatgccacattccctccatgttcatacagagtcctttcctccttagaaccataataaatcaagtttttctgaactggaactcaggtgccttgcttctctgcctagctgacattcactctcccgtctcagatgaagcctagattcctgagggaggtcatgtctgactctttagactagataaatgagggccctgtgtgcacctgtgataccaggaagggttctccttgccaaccttgaagcccactgtgtgatctacattgttcccgagcgtgccttgtacttgcaaagtcacagctgtatgccctgttagcagagtaaaggagagagatgatgttactgttctctgtttattgataaatacagtgtagtacaattgtgaaaatggatggcttttgacagagtactactttccttatcctcattaaggattctaaatatgagagcctcatgagaccgacccagtgactgtgggacaagtttgtgataacatggtaggatttaatacagttttcgtcagtgatgggatgattctaatttctagccgatatccctgacttcttaatccatatagatgcctagacatctgcctctttgcccttctagaaatctctagttcttcaattttaaaatgtctccactccaaggtttcttctgccactatgtaattctctccctccttcctccgtaaggatgggcatcaccttatcccttctgcatcagcgaaactgtgagttttcctagattcccctgtccctcggcaggcatgctgcccaccagcccgtgtagacagctttccttccactgtgatctcatttcctgctactgaggccttccttgtcagtgttgaggaaaacacccccagaaaactgaaacataggacagcatcaagtctcgtcaaaggaagaactttataagaaaggcattagtaactataaaaacaaagactattaacatacagttgtaaaccaagaacgagtaagcatgaaaaaaagccaactagaaaccctgagaaggaaaggttgcaaataggtaataaaatacaaggtacagtataccaaatatttaaaagaataaaaaacaaagtgatttaacttaagagagaattggttaaaaaaagataaagataggatttgtccaaaagatagcctttaaaaaggaatgcaaattatgaatgtcagggtctgctggcaaagtcccaattgtgatcaatggtcagttctactaattgtgagagaatgaaggcagcagacgcaatatttaaagaagcgctgcctaatattttatccctttggtactgaagaaaattctgccatgagaaagaacaggattttgatgattgaatgacacatggctttctcttctggaacctcagagacatagttctctatggaaatggaaactcagaggcacagggactgcggtgggtgaggtagtgctttgtacttcccaatcgtcccagggccactgccgcagctctgcctggtaataagggaggcaaaaggatcaagagctctctccttcagtgctggcagtacaattgctgtggtcctttaataatgtccttccctcagcaattgtgcttcgggcttggtcttgttcagtggctgcctttttcagctttccattaggtttttactggcttctccacctccagcaaaatctgctgttgttcaagaatacaacccagttatgcccctttcccgtttcaaaacctgggttgcaccaagctttcaagattctatatatgatcctggtggttctgcttttagctttcctttttttttttttttttttttttaatttttgtttttcgagacagggtatttctgtgtagccctggctgtcctggaactcactctgtagaccaggctggcctcgaacccagaaatccgcctgcctctgcctcccaagtacccagaaatccacctgcctctgcctcctaagtgctgggattaaaggcattcaccaccactgcctggcacctcttgtattcttgtgatgatggcaactcttccatatttatcataggagtccatttagctattgctttctatttgttgtactgacagtcagaaatgcccgaggatcttcacaggctacctcttgttgctcctctctatctatattcagaataaagagaaatgtttgtggtgtttcctcaaggtgaattgacagaattgggactcaacaccacaataggaaggataggaaagatggaatattcattccagctctattttttgacaagctagaaagagacaaatgcaaattgagaattgagagtgtagaggtaatagttgagtttgagcttgtgggtgcacacacacacacacacacatttgaagaggcctgagacaaggaaggaccatggtgcaggcagcttggaggtgatgatttaaatattaaaagctaaagggagctgaagtggagagctgaagtgcagagttccagagttgggcaggagagatagatggctcagcagttacgagcactggctactcttccagatgtcttgagttcaattcctagcaaccacttggtggcttacaaccatctgaaatgggatctgatggactcttctggtgtatctgaagacagctacagtgtactcatatagataaaatgaataaatcttaaaataaaaaaagagtttttcagttagtattaagtttttagtcatgattcctgtggataatgtgtaaggattacccactagtcttctggacatgttaaaaaatatataaaccaagtaacatttatcaccaagattaagcaccaaggtgcttagaatcacaatgtccttccattctgatggtgtcatctgtgcagcatggctctgagcatcttccttacacagcctcatagagttttctcagcagtacagtaggcttagtcctctgatatgagtatgggatcagatagcagccactgttgctaaatattacagtgctggtcacataaggatagacagtcaagtcttattaatgctttattgaaggcaaaggaatatgaagactttgtgcccattgtttgcatatgttagattttcttttcagagcctgctttaatattcttcaagcccgcagttctgcttcgggttgtcaccctcacattaatagaacatttgtttcagattaagaagcccaacgtttctccagtgcctgctggtggacatctcagcaaaccccctgcaattaagagaggataaattggcataatatgtccacagagggtgggaacttgattcttaaaattgccaccaccatcagttcactctcttactcattggactgccatgtgctaagtagttttatgtcagcttcatacaagttaatgttatctgagaggagatttaggaaaataagactctgcttccataagatggggaggacccacccactgtgggtcctgctacccctggacggagaatcttgggttctgtaagaaagcaggctgagcaagccttggggagcaatccagtaagcagcacccctccatggacttcacttccactcctgcctccaggtctctgccctgcttgagttcctgtcttgacttcctttaagccaactaaaccctttcttcctcaagttgctttggtcatgatgtttcgtcacagcaatagaaaccttaacttgagacaagtgccatctctcacttctaccttctttgcagttgacaaagctttctctgatttctgaaaaaggtttctttaatatgtatagtgttctgcctgtctgtaggccagaagagggcaccagatttcgttataggtagttatgagccaccatgtgtttgctgggaattgaactcaggagcaaccagtgctcttaacctctgagctatctctcgagtgcctggcaagtctttctcaattctgtgtttaaattgagcctggatcctactttgccatgagaacttaggtgacttattcacatctagtctctcattccagccactttctagttatcagggtagacattcatatttttgtcatactggcatcttatgttcaaactgtgctcatatatacggttaagattcagtatatgatcttggcatacataagtggattatttgacatgaaggcaggtaagcagaccacaagacctgaatcaatttacagtgtgaaaagaacatttggtcgtaagggtggggcagcgtgaagcaggctgctattgaggctggagtcatcgtgaagcaattcttagaaagcttgatactgagaaaagttgagaatgagttaggaaggaagaaatcggttcttggtgtcagagataatgagatgtagtaaatattggtatgagcaaaacgaaagagtcagcagttggaagaagtctcaggaggtcatacatgacacaggaccttctgtgttgtggttgaattgtcttcaaaaattggaatttctctttcatttcaataggaaaaacctcagcttctacagaatgtattagagcctttaaaagagataactttatcaatggcccactaatgtgttggggtgagaattatttatgtctttgcttatcttcatagcccagtatatttttttttgaaaaaactacactttatgttggttaaaaaaatactttgttagtttatgaatcttgaaacaagtaccatataataagccaattttcgagtaaatcatcatttgtcaagaaatagctggcaggatttgtcatcttatttttgatactttggaatcttgttttggtgactcacattgcaactgttgtcaaaatacttattttgcaagaactagctatatttgcctcttggaagtgtgaattttgttattttccttcagatcagttcagtttttgttccgagaacaaccaatgtatacacacaccactctcagagcacaccacatagctccatactaagcctgcagctcagtgtggagccgtcagaagacctttggaggacaataaagctaacagagtaactggtgtcactgacctggttgttggggcactctgcaactagatgggccattgtacattaaagtttttccaagtcatattgtgcaagttacagtcaaccttcgaacgcatcctctgtggtaccttggcgtttggcagctgggtttcttttctttctgggctaacacacataactgctgtgcagaatctgttcactgagtttccatctataaagcaaaggaaaatccccagcgctgggcagtactgcttcaaagtgtcagaataaagcggctgccaggttcttttaaagcactgcagaaaggattaagactctaggaccaaaaaacaccttgagatctttatggaaaatagttttccaattaaggggctgagttaatggctatatgggaaggtgggtgattcatggggcctagaggtccctttgcactcttgctgtgtccctcctcagctacttgtctgcacttcaggaaaagtcggagaccacggataaaagaagttacactcctcaggattcataaagagcatacggtgtgcactgggaactgccagagggtctcagaggctaccatcttcaaagcaaatagactcattggtcaaatatgtaaaatgcctttaagaataaagatcaggatgaaccatctcaggcagagtcacattagaacaggaggaagaattcgatataaaggaatttgcttaattttttaaactatgggttattattatttttaaaataagtatctgtgaatgtctaaacatggagattacattgaatggacctatgtgtaggtgacatttatatcttaactatgtgccacgtgcccttccaagggtcttgcctcatggtctcaatttttatgatgctactgtgtgcaagggatagcttttagtatggtttttggaagggtaaacacaccgagaagagaggcaatgtacccatctttataaagctgggggctgcagagatagggtgctgcccctggatatttttctgaagctgctcagaaggtccagacagagagaacgttggggaactaggaggtaactacaaccccaagtgactttcaggggtctcttcccttaatctcatcccctgggcatgcttttctgtccagaaactattctgagcaaatgtacttctgacggagttgagagttttactatagagatacttgtggtacatagggcatctgggatcctaaactgtggctggcagatttagagaactgcggcccatagtaccctgtcactgacaggtgtgtgggtacatcagctgggctgctgccagctgcagcaggcaggtggcaaggcagaaacgtggacagcaacagattggaaagctcgaaggtgaacaagggggctgggtaaagtccccaagccaggagtgttggttggcagtcaggaacaggtggctgtgtagccaggagcagccaggatcatcctgtgctggactgggaggatctctgatgagggatagataacagctgagaggtctcctgggaaagtgcctcctggcaggctagcctggcttcctcctaaacaaacagccctgaacaggtctctcatgccttcaagggacatacatgccctcagttgacagagtggtcatttttctaaaagaaaaaaaggcagacaaaaggagaaagctggttttgtaaagagaaaggttccattttaaggatctctgcagggccatggatctgcgcaggggttattttcagaaccaaaccttagaagaagcatcaggaaaggagatgaggattctgaacctcgctgatactgcctttttctaaaggaaatggaagaggcagaggggaggagggggagatccagcacgcacggatcaagagctatgccagagatgcagactggagatgagctgctagaaaaggggacattttaggattctagcttattttatggaaagtggagagaagtctttttatggggaatttgctctctgcatttacctacttggatcaagaaaacaaaatcaaagaattattttggagaataaaagataaaatgagaagagtaagtccattaaaaggatgttaccttctactggtggtgtagctcaggggcagagcacttacctagcagttgcaaggttctaggttcaaatcccagcataaaagacctaggtaaaattcttagcacatagctccaaagtggaaaagaaaactaagtttttaattgtatgtattcgtatctgatgtcctgccaggctggttcatatgagaatgcacagttcatttaacagatgagtttgtcttgaaagattaaacaattcatctcagagtgtctaaaagagaaggagaaaaggttgtggcttgggcccctgtgcatgtagaaatgtggccatggtctcgtggtcctgcgtgttctaaaatgcagggctgctcttctgacctaggcccactgtgtagtttaggaaggtactttttaacttccaaagcaaaaagtttcagaactttagctcgatttggtttttgtatacattataaaaccatacataaacagttgaaatactttactttcaacatgtgaattctaatgatttccaatagagtcttaaaactgattttgagttctttgggtggctttggcattacatcttagatccaatgctatttgctttttaggcttttttatttaatgaattttctagttagctttaattgtaaatttaacgtagtccatagtcacccaagaggaaagccacaagtgaggaactgcctgggtcagattggcccattggcatgtctgtgtggcttgtcttggttattagttgatacagcactgcacgtcttgttggtaccattcttagcctggactgtttaagaaagcaagttcctgagcctatgagcaagccagcaaacagcattccttcatggttcctgcctccatgttcctttctgtgtgtgcctttcctgatttctcttgagacctgaaagtgtgagccaagcccctttcctcctcacgttgattttggttatagtgttttatcatggcaacagtaaggagccaaggaaaatgaacgaaaggagagttagtcaatgaatcttaggaagccatggaaggatgtgctgctcagaccactatactcccaatcttgaagaactagacaaagacagaaagcacaaagatgtgctagtggaacatcttagccaagcgttatctatctagaggagactcaatgtttctattaaatggaaacccatatccagctattgtcaaagatggcgattggcttacaagtcactggtcagtcagctaactaatgcgaaactcaacgtttatacaggaaatgagaaaactatgataccagccgtgtgctttccagtttggtatcttatgttgacttgagagtaacttggcttgcctgttgggtattgcttaatgatggtactggatcctggcctgtgtctcttttatcatctgcagaattgtcttcattcgctggctggctccaagtcatgcatagagtttctcctgagattgaatttatacagagtaatgacagcttttgtgtatctgtgagcttatgaccagcagctgctaagagccacccagcagtggaatattttcttagaatagtttattatcccagtctctcctttctaatagtttgcttttttacttacttatacatccttttttttttcttaagtaatttcttaattacttgactagtgattttggaagtgaacccagggtgtagtttaagcaggcaaatgttctttgagcacagttttggttttaaaagaatttacttattttatgtatatgagtacactgtcgctcccttcagatacactagaagagggcatcagatcccattatggataattgtgagccactatgtggtatccgggaattgaactcagaacctctggaaaagcagccagtgcttttaaccactaagttatctctccagccccagttttggtttttaaaggaccagtttatgagtttccatttgatagaaacattgagtgtccttttagattctactagtgcctacatactgtgatactaacactgagggtggagaatgggagagttatagatgaattaagatgtctttttctcaagggacaagaagaaatgacaatatgcaaagtactcaggtgtgagtcatcttttgttccaggtgaagagagagaataattatgtctttctggcgagatcagggacatgtacttggagaaggtggctttgacgtgggtgataaataattggtaagatctcagttgttataggtagaacaaagagaaaggggacatttcaacacagcatatgacagtgaaaatgtggatttagcatatttattttaatcatccacaaaattcagaatcaagggttatttgtatagagtagaatttcttgacagcagactctggaaggccttacatcttaaacttagggatgtatacacttcatagctaaaagcgatcactgaaaatccaaggaatatgttagaagtaaaatctcagagaaaagttgaattttgtttaattatggttgacatggtgattagacaataagactagagatgtagagacctaacttgctggggtgacacccaagttcaaagtggtaggcacaacttgaaaagagaaaggtcgtcatgatggtagcaacacaatgagaaaatgagaagtggtatcttgtaagtgttgtgtcctggaagggatcagaggaaggtgaaagcagaacacattctctaaaatgtgcctggaagacctgccaaaggcatgggcatggagtgtaggagctcatgggcaggaagtcggagttaactggcagtccacacagtgaagatggagggccacagtggatttgtgccatagatagagagaggagtcatagtgggtggagttccactgagagggtgaagggtcacagtgtttgggatgcctcatgacagtgaagggtcatagtagactggtgacacagtgaggtgaagtgtcataaggtagcagctaaagtgggggtgaagggtcattgtgagctgagtaccatagtgaggtgaaggaccacagaaggtggggtgctaaggtgagggtgaagaagggtcatagtggcctgggtgccacagagagggtgaatggtcacagagtgagaggtgttccagtgagaataatggaaggtcatagtgggtaagtgccatagggttgagggtgcaggattaccctgggtgatgtgccaagtgaaggtaaagggtcagagtggaagaggcactgcaaggagagtgaagggtcatagaaggttgtgtgccacactaatggtgaggggtcatggcaaggtaggacaaggaggacgtgagaggtgtggtacactcacctagatgcagagctagctagggaatcccagtgaagccatcttgctcatcatcaaactgaagcagtgtttttatgatctgtgcaactgaattttgagagagatgttagcaacagagctatgcacttggaattgttggtcagtgggcactaagagggttgaccggtaaaagcatgggaaaccagcaccaaatcttggactcgggaagcctaaggtaaagggaggaaggaggtatgttttggactttattgaaagggtatataacacggattgtggggaaagtaggttaccaaaggaaggaccagaaacaatgtcaaatgaagctgacaggaaaaggaaggagtgaagtgctgtaggccattagattaaggtttgattagagcagctaagagaagggtcagaaagtggaccatggggccagccccagccttatgtaacagccgttttaattggctgagatgcatattccactcactcggcccagccttatgtaacagccgttttaattggctgagatgcatattccactcactcgccccagccttatgtaacagccgttttaattggctgagatgcatgttgagtgttcagctcaccgttgttcctttcccgttcctgcggctgagagtttttgtttaatctttctgtattgggtttgtgaggttatttggcttcatggactttattcttttcatatttctaacttcagaatgttccagatataatagtatccccgtgatgcctgttctgaatctatggatcagataggaattaaaacccaagtcactgtctgaatcctggatttagagggttggcttggttcagaacagggactttggaaaccttgtgctattgcagcaactgctctcttggcttgatttatgactgaagcctggccttgttaccagtgtcttctctttgagggcacaagctttggggatacgggactaataggactcatccttacacccccatattttgacgggggtctgccaactagaaatacatagttgttatcttattagaaaggggtgttgtttggttgataggccttggttttatttttgagatagtcttattgtataacccaagcctatcttgagtttgagatcctcttgcccctgcctccagcattctcaaattacaggcctgtatctatgaaaattttgtttccaaagtttttttgccacttggtttaagaacacatttgctttccagttcacagatgcagttactgcagagtccctggcaaaggcccaggagttctacagtgtataatttaactatagacctcagtcaacatttcttattctcaaaggcgatcaactcaggataaaaaattctcaagaattcttggtttccctgaacattatgttaagtgaaataagttagattcaaaaagccaaatatacgttttaaattatatgaggacagtagaataactttaagttaagcattaaatagcattcaccagagactagaaagtggtacaggcacagcatggagaaagatggttaatggggacaggggcacagttgaataggagggaccaatttatgggtgtgctaggtattgaaggatggtatgtgatgtgatatcactaaatcttgctctagcacaggaaaaataatcaacgtcagccaggcagtggtggcacacacttttaatcctagcatttgggatgcagaggcaggcggatttctgagttcgaggacagccagggctacacagagaaaccctctctcaaaaaagccataaataaacaaacaaacaaacaaacaaataatcaatgtctaatgttttgaagaacagtagaataacttcaaaaataattagctgaaaaaccttgaaacagctagtaaaaatgattttaagtatccccagcacacagcaatgatgtatgtctaagaaagtagatgtgttcttaccctgagccaatttctatacagtgtgaaacatgtattgcaatgcgtgctcttccccataaaagtgtgcaggtgccatacatcaattcaaatgtatctaaataactaaacaaaaggtaaacttaaaagaaaaatagtttcccacccactatatgcatagctgtaggcagaaacagaccctgctttgcgcccacagagggggacatggaggtgaaattcgcagggccccctgtgaatcagctcaggagcatttgtagacaggtagcctcttgttcaaagccaaggatgagctttgtcagcaacactttgtcagcaacgcaaagaacctaaccattttaagtctctttttgcacttttaaaataactactattcagtaataaccatttagtgttcataacagcctttaggggtgggtagcggctaccttcatttacagatcagctagtgatgtttagaagattgcagtttacactgcagacacagtaagctcggtgtctgagcttgctagccagagtcacggtttctcccacaccgatctttgttcagacgggcatgagcactgggtaactttggcagcccctaacttctctgtggtctgtcttcctctgttccctatgtctgtcccttgtctgggatctgttctgggtgacacatccctctcacccctcctttcttgctgacaggcagtgtctgctcactgccttccttgtgtttggggaggcagagcacagctgtgcccgtcagggcaagagcacagctgtggccagccacctgttgagcgcttttctctggtggctcatgctgcagaataagtggcatttactagggccacacttgagtgaaaactctctacatacctgcaagaacaattgttcatctcccccaatcccatctgctacatgttctcctaagaacatcatggatcaggggttggagaggcagctcagtagttaaagtctccgactgttctttgagaggacttgtgctccatttccagcactcacactgggtagctcttaatcatttgcaactccaattccacggggctatagtcacctctgtatacacacatatacacgcacaggtactcgcactctcactcacatagacacataattgaaaaataagtcttaaaaaagaccatgaactgaaggttgtttgcataaaaccaacagaaaccttgcctggctcattcacagcttgagcaactctgggtccatcttgaccttgcaggctcccattttttaatacgacaaacttaaatatggtgataatgctaagtatagaaacaaggaccataatgataatgaataattatttaaatttgataataacacttagtaattggttaccttgagaaaaagtaagagacgcattgacagctaagaggagcaactgtaaactttcctcagttaaacatttttattagtagtttctcctttttgtttgtttaaaatcatgaagtgaaactaactgtatttccttttcctttttttttttctttgcagaaaaagccactgtctgccattataaaggaagtctgtgatgggtaagtggaacttggagcttggccgaggctttctagtctgtacataaaaggcaaataaaatatttgcagcagagtggtgagcattattcacagtactataaataactataaccatacatatgttcctaacacactgctcattctgcccagagtcactcagttcctgtgtgtgagtggcacccgatcccgccactcttagctattcttcctccaagagcagagcgtgcaggagctgggggtgggtcctgcacaggaggctagcattccttgattttaggaagctgttctccttttggccttcccagcagggggcaatctcaaggttcccgtggctaagcacacactccatctgaagaaactgagaggatttctaggccagagaagatgaggagcctcacacgcccccgtgaggcttgccactttgctgcctgagctgacaaggcaaggggaaaattcacttgaaagttacctcagatgggtgactggcacagcagagctgggactctggtatattcctgataaattgcacaagatgcagaatccttaattggagcgtttccaatctgtgccaggtggaccagatgagagtttagtattcagagacaactgaagaatattaaatgtaaaatgtaaattgtgtttatgtcctttgtttttcttctccttgcttcagtcttttaaaagaggaaagagtgttgcttttaatgttccacccaccctgcctctggtgttagagatgaactgttaaaagcaggaaccggcctagtcagtctacctgtgagatggtaggctccatcctggtagagagggcaggctaatgccttgttgtcttggaaactgccttataacatggtactgtactgggccaaatctaaatctagatttaattcatcttaacccagaaaacccactaaagcagaaatgaccacttccgtgtttctgatcatttcctcttcttttaaaggtggtctcttgccaaccatgaatattttgcactgcagcacgctgatagttcaaacttctacatcacagaaaaggtaggccataacccagggctcgtacaccgaagggtggtaaatcatggctacttcttccgtttagagccagttaaaatgttgtgtccttaccctctgtgataataatgtctatacgcaaaacctgcttctttagtatcaaaaaaatactgtttaggatattcaagagtgaagtttattaatcccagcacttgggaagcaaaggtaggtgaatctctgtgagtttgaggctagcctggtctacataaagagttccaggataggcaggattacatagaggactctatctcaagggggaaacaaagagtgaagtccaagcaggtgtctgagtcttgtttatccaaccacacttactttctttatattttaaacaaacaaacaaacaaacaaacaaataactaaacacagtttctttatttgtgtgtgagggtatggcaagtgagggtatagaatgtgagggtatggcatgtgagggcacggtgtgtgagggtgtggtggtcagaggatacctccaggagctggctctctctaccacctggtttgtaggaaccaagctctgccagtcaggcttgctgacaagtgtctgtacctgctgagcaatcctgcctctacagcaaatactttatctgttacttctcttttttggagttttatctctttccattattttgttttatattgaatgtacttactacaatgacaaaaaacattgtgagatgtgacatcatctgaacagtgacccttccatggctcttaggaacttactttcttcctaggtcattttgacactgtttattaagtttggttgagacttagtgatatgtgaagactttgcatgactctgaaagaaagaaaaatgtgtaaaagtcctctgatagggaaaggaaaactagcaattactgatcttctgttttacctgtgtttgctgatctttttcaagactaaactccaatataataatattgaacttggttaacaggtgaaaaatgagccactgaagtcacatggttagaccaccatcttgactctagagttaagaaggagctttagatctttgtacttctagaatttcatctttggaagtttctgaaacactctagtatcccactgaattcttgagagaacttgctatggtgtataggagccgtgtgtcctcatggatgtggggctggtggggaaggagggaaactggtaaggccgggccaccagtgattccctggctgatgctggaaccagggaattcatgatgctctcgagatggagaagtgggtgacctcaggctctgaaatacggttgacttcatttgtcccaatcggcagtttccgggatgaccttaggaatgtcatcataaatcagatggaggtgggaagtggaaacagtggtgtgtccacttgtgtctcagttgctgttcctccagacagtagtcttctgtaggtaggagccctttaagttagatgcctggaactgccttcaaaaattgcctttgtctttccaaaaggcacactgggactttcaagagtgaactagttttcctttcatattcctacctgcagatggcgaggaagcatggactagattttctggcaggcgctgattatcttttagtatacccttggctacttaaacttagtccataaataattaagttccatttgattattttcttaatatttttaatttttgtggcacctatataatttgcatgctaccctttgtgagatttggagagtatcaataaataaaagttgaacgttggcagtgacgttttatcgctgtggtttcattcatcagccatggccagtgcagttgattcagatggttgcaaagtctttaacacgaggatacaacagaatagctcagggtgaatctcctgtggtttttgtgaaatatttttctcaaatacccacatatcaaacatgtagattgaactgactctgcaacctgtgataaataagccactgtgtcactgaggccctgcctttgactaatgtatgcggactgtgttccctagtggctgacatatcccttgttatcattggttaaaggccttaattcattgttcattggcagctaaggaagacctagagcgtaattatctcagggagatggggtgagggatggagagggacacacacacacacacacacacacacagagagagagagagagagagagagagagaacagacagagagacagagaacctttcacaaggtaggttttcaaatcttaatgtcaaagactgaccaggtgagcttgtcatctggaagtttccatttaaacttcctgggattgcttccgggactgtcctgggaatgctggtatagtacagccagggatttcttaaggaagaaagaacattggtgcttcagagatagacaggtctcctttctaaagccagacctatatctgtgggacctgatgcactctaacccaaagtagttacaaggttgggttgaggagtatatgtactttcatttcttagaatgatttttatagcatcagaagagatttaatggcattttttagttaaaagtcatatccatccagataattcaaactgctaagagtagggggatgttcattagtttttgaggcattgttctcatttttggaggggaatattgtttgcctaagacattctttctgctgggtttctaaggaacttccctcttccgtctgtcatcagttcttcagcacgtggtcacaacgatcagcctttcactacgagtttagagactgagaatactcatcctcccagtcatagtcctgtgtttgtaaataatgtgtcacagctcttctcctccagctgtgtgtgcctgtgcaaggcatagagctagacatgcagtgtaggagaccaaaatgtaccttgaccctttaggggtcaaacctgggctatcctctgtctgcatctacgttcttgtaagttagttctctccaaaaatagagacccttttccgttcttaaaatagcatagttacaattctcctgatacttataacccagtgaattgttaggtaatatctgcatcaccatggtaaccagtgactaatttttgaaggtctatatgacattagtttctgcctttcacttactatgagatggtttttctctccttgacaagagtcacctgtaatttaaaagggaaatattgtgtaggcctggcccagcatgagaacgtatgaagtcactgagggatgcttgagtttctctcaaagattttcaggaaggaacccatcctctgcctacttttctcatgttatctgaacccattttctaaaacagttctcattggcttattgggctatgtgtagtgggttaaggaacattttgtagaggtgtagtttgaaaaattgtagacaattgtgagatgcatctatttgcaaattccaattctgtctcagaaacataaatttcaggatagatgagtggttttgtgtgtgtgtgtgtgtgtgtgtgtgtgtgtgtttgtctatgtgtgcaagtgtgtacgtgcatgtgcatgcatgcatgcatgcacttgtgactgtatcactgaaatttctcttttgagacagaatggtagtgagagagtgcgcatggttttagtgatcgctgatcactgtcactgtaatctagtgaggtaagcatcttcattttcataagggaagtgagaccaagaaaagttatgagacagtttgtgtagcctgacacactagaagtgatcaagcccagcctggccttggtaggtctgcttccagagctgagggaatgccactgctctgctgtctgcgctccctagtgttgatgatcgcctgtctttgctgacatggtgatcctgattccaattgcctcaggagtcacagaacaacagaaccatcattagcagtgtcagtatgtgactttcttgtactagtgtattaggggaattgacatcaggcataacctccattaacttactagagagttacaaaccttttccctgcctttgctatagattatctgaccatctgggataagtactgtgattgtactattggcatttttcttctttttaagggaaatgagaaaattgccttgcccttttttaataagtatgcagaaaggggtgggcccctccaaactatatacaccgaaggaagcattatgagtgatagactttgatgaaccgaggccgtgccgtatttgcagaatggtatttgctccttctctgctaagaccaactcaattccatatgaagtagagagatccatccccataaattcaataaatgctgtttcttgtaatcacagatgtgatgagcttcatgcaggagctctctgcaaagctgcccctggagcctctgggaggaagtgaggctctgtgaggaacacctgtgttcccctatcccccttctcctggtgctctggtttttctttggatgttccagattcctgacagctctgtgtggcctctgggacagggcatcctgtcctacaagtttattgtgcacattccattgtcattgtcataagtcatcagaataaaaccagtatgcagcaaacaccaacactctcctctctctgcagagaggagcaaagcttgcagtcctcatttccatctcaggcttctttttcctgtgtttcctccttgtctgaggccagtcagccctaccacgtaactgaaaccaccatggactgactgctctttgtgactggtagaccgacaaccttctcaaagatttgaacgtgagcaaatgaaagcccagggaggttgtaaaatttctggcacagggaggtttttctgtaagaatcaggattcttatgatcaagagtaattgttacttcctcagcgaactttacacctcagtaaggtatgtacagattatgttcacacctgcagagctgggtagctcctccagacctggctcttagcaatcatgtgtgagaggggagaaaagctcttgtaccccacttttccctgatgcttagcccttgtgggtttcccgactcaaggcatttctctccttggcctcttctttccttctgacacctgatacaggtgtctcctctgcagagcatatgctgcagaattctctgcttgccttgtgatgaaacaggacatttgttaacattgctttgtagaggctgtgttagctacttgactatctattcgcagactttgtcaagcacaggactctggaagacatggtaagttccccagtgtgttccaggcactgcgctaagtgctaagtttgtgtacagttcaacagttccagtcttcctgattctcacagaccccagtcacttgattacaatggcagtaagggccacagacgaaaaatgtgcctgaacttaatgaagtcctcaacaagtgttatttaagtgaaagtctaaagaaaacagggtacttgtatggacaacagtaacatgactcagattagtagctggctgtcaactctcatggcaaggccttggtaagagtagtgccctgcatttgagaccagcctggtctatatagcgagattctgtcttagataaaacaagtcaaacctaatcaaataataaagctacacaaacaaaacacacctgggttgtttacttacaaagaacaggcagcaagagccaaggctaagggctaaatatggctggaccgtgtggcacaagccacaacttttcaggcccttttagggtgttgtaagatgtttagcttcattctaaaactgtatgaaagctctgaggtaatttgaagctggacatgaccacaaatgtttgggctattattattctgattgattgtgttggaagcataagtcagtcaatggcagaaattatgaaaaaaaaataaccaattcattgtggataggaaaagaattcagggttagcttggaatgcacatagactagcataaatgctggtttctattcttgaattcaaggagaaaatgggaccagatagcagagttgacatatctactttcatcagggtgtgttggctcttgcctttaatctcagcacttaggaagcaaaggctggtagatctctgagtatacctggtcttcaagagagtcccagactagctagggctgcaaaaggaagaactatctgccttcatgaagtttactgttcatcacctccttggcaacatatttggttataaagcctgcacttgcataagaatgatgtttagttatttcagatgatctttttctaagtctattttcctagccacataaaatatcagaatatacttacccaactaatgcaccaacttcaacttactgtttagaattgacttcttgtacaggggttcctaattttaattatttatactgtttctaacttgtattaggaaaaagtaggaaaatagatgcaatattttcctgtagatcagtgtgcagaatataggaaggaggaatttttctcttatatttgacagctcagtgtatgattgattgagtaagataaataaaaaaaagtctttgttcccattggaacagtttcagtctgaagacagattagttgatatccctaatgactgcaaggtctgggtttttaaagaatattgtgaatataacttgaattaggtaggtttataattgaaccactttaattctgtgtcttatttgaacattgctgtgtggaatgcaacacttctactctatttctttattgttactatggagcgaaaattcatacaccctaaatataactgtctcagtgatttttttttttttttgctgtgacaaaacactatggagaagaccacttatagaagaaaaaaatttatttggatattacgatttctgaggatgatttcctgaatcatcatgataggggcatggcaacagataggcaggcattgcactgggtcattagctgagagcttatgtttcatccgtagaactaaggagaaagtgagagaaaatagaggtggacggagggaggaagaatggaggagagacagagagaaacagagccgatgattatgtgcatgctagctgggattggaataggcttttgaaattttaaagctcaccctcagtcacatacttcctctacgaaggccccacctcctaatccttcccaaagagttccaccagctggggaacaaacattgaaatgtatgagcctatggggaccattgtcattgtgaggaccaacggacctacaacacagtggttttctgtcatgcttcattgttttttgggggtagcaaagccttgatattctgtaggatatttctgtcttctaaaacagtagttttcagacttaatggcagagctagagatttatttccagcattccatagcaaatgccctagcacttttaaatagtgcaggtctacataggctattgctacaacctggtgggtggaagtgtaccctctgcatctgaggatctagaggcaaaaaagactcatcagcttatatgcatacagaagtttccagaaaggaagacattgaccctgacttgaaagtattgctgactcccttcccccagtccacatactatttttcattaaatagagagaaagtctcaacacaccctgtgatacatttcctaagaagtgtgggaacatttagacataactgttcgcgtcagccactgggaacgcaggtaggagcagacacggggaaaacagttggaaacaggtcaggtcttcttctaagctgtttgcagcctgtgaaccaggagcgagaattagtctgtcacccctaccctcacccatacactttcagtttctctaactggaaatcccaaagattgtcagtataaatatttaccttaagagcacattggttaatcccagcactcgggaggcagaggcaagcggatttctgagttcgaggccagcctggtctacaaagtgagccccaggacagccagggctacaccgagaaatcctgtcaaaaaaaaaaaaagaaaagaaaagaaagaaagaaagaaagaaagaaagaaagaaagaaagaaagattgaaagaaagaaagaaaagagcactttggatttttcccagttccatagttgacgatcaaaggcaggggttcaatcaaaggtgaagtgcaagttacagagtgtgtctggtacttggttctggaaggatgattgcagtagagtagagctactactgttggaccctctttaccttttgtgaatccatcaagcatatacaaattgaaacacacacactatacacagaccacacatgttacacacatttacacatgcatatataccacatacatgaactcaaacaccacacacatacacacagcacacatacatccgtacccaccacatcatatgcacacacacactccctcacatgcaccacaaaccacacagaccacacacacacacacacacacaaagccttcagattgtcctgactttatccagccctggcactggctatgcccgtggaaagctaatcccactgctgtcaggggcactccacttacattctgttagattctggtgtccttgctcttagtgactcaactaaactggcagtagacattctgaaatctctaaaaacatttttgggtggttttggaactttgtaattacagtttgagaactggatagaagccctcattttgaattactcagtgtttttcctttagcagggacttggacgtgcataaacttcaagatgaagagaaaaggctgtctaagttgaatcacataaatgagagggggtgtgagccagaagggcagtgacgctgtcagcattcctcagctggcagtgggttccatgacatgttatttaagtttcccactgactcgtggatattggctataacaggatgattacatagatggatgccttgtttgcctgggttctggggcttgtgcttggtaagatatggctgcttctagaattacagggaaagataaatgccagaggtcatcatgattccatgttctgcagttcagctaccaaaccagtgaacagactgactccggttctgaaacatttaactgtgtggtgctcagctgcagaatgaaggacacattcactttctccaaagacagagttcctcccagacttctgtgaaagacacgttttttgtctctgactgtaaatgaccccggaagcagcagctcaccctttctaaacagacaggcaaaactcattagcgaaccaatcagttccaagcttgggcctgtgtctcttatatgttccaaagccagggtcttcttgaaaggcttctaagtacaaccctgctcctgtgtttatgcttcagagagatttattttaaatcagcattagattttcttcctcagtttaggaatggagacccagtgtgtttgcatctttatttgtgagtaattgtgtgtttctgtgtgtgtgtgtgtgtgtgtgtgtgtgtataaaaagccattcatgcaacattagatactttgttgcttctcttgatgttgttttttactgtattatttttaccttgctttatacatttaaagcatgcgctaaacctgtcaaaagctttttatgattaccagtggttgtgtttgacagttgggcgaccatttcattattctctgctctctgtgaccaaaaccaaagctagatgctcccagcttgtgttattcaagtagagatgggtgcggacaagagggtaaggggaaggagcaaaggaagaaagctagaggtgtgtcaggagactgtggggagagcagaggaggatttttttttctgtcccctggaaagcagcatgcctgcaacaccacagagttggcatataggccacttggttgctattctttccatcatggtcagttaagataataattattgtacaatgttttttttttctttcctgatttctatcgttctagttatcaactgatctctcctaaaaacacttcacaattagtaacttaaaataaaactcattcttggtggctgtgattggtttcactgaagtttctggtcaggaatttggatgtgagaaagcagagccagtggctttttattacttggtgcctgggccacagcttagaagacatgtgctggaatccttgtctttacctgtaggctatggtgactaaaaagactccttctcaagatgccttcttctggcttctttgggtaccaggcatgtgtgtgacacacagacatccctatagttaaaatacccatacagaggtacatacaggcatgcatatatttgtaatgcatacatgcattcatacatacatgaatgccttcttctggactcagagggcatgataactgaggtctcctctccctactacccgttcatccctgtatggcctaggcatcctcttagcatggcagccacagagttctcttatgcacctacgtgggatggagactgtttgcagagagtaagacagcagttgtggctgggcagtggtggtgcacacctttagtctcagcacatgagaggcagaggtaagcagatttctgagtttgaggccagcctcgtctactctgagggtgagttccaggacagccagggctacacagagaaaccctgtctcgaaaacaacaacaaaaagcgaacaaatacaacaaacaaacaaacaaaagacagcagctgtggagcttcttgtggcataactgtagagatcttgttggttagtgcactgtgctctgctgatctgagcactcctggtctgcccagattcaaggggcaaggtctagaatattcttcctcatatattgagtaaagaaaaaaaaatccttgagggctttatgataaaatgtcctaccatccttgacatctctatcagggaaaaattaggagggaggcatcgtttttccagagggtatcagagtagaaactggcttctaccttaagtagcgaaagaagaatgaaacaaaaaatagaagaaagtttaagttgtaatatggagggcatcagtgaaccacatttccatgaaggacacacaagaaaggatccgtggggctggagacatgactcagtggttagagcacttgcctttacagagaacataggtttgattcctagcacccgcatgatggttctcaactatttgtaactccagttccagtgaatctgatactttcttccagcttccttacacaccaggcatccatgtgactcacagatatatatgcatgcagacagatatacatacatacatacatgcatacatacatacatacatacatgcatacatacatacatacatacatgcatacatacatacatggatgccttcttctggtctctttgttgggcaccaggcataagtttcagacacagatgtacatgtaagcaaaatgctatgagtataaataaataaatctatttgaaaacattaaaaacacaggaagattctctctgctcttccttgactggggaggaggcaatagctgtgtcctatgttctcagaagcatgtattgggccttttgattggagaggaagttaccataggttcttccctctctgtcttggtttcagtaactgcttgtcactgtgacacttggtgctctggagcagaggagctatggggaccttggcccagttatgagcctttccagcccctgaatgtgagagaagttagggtagccttggttatcaagtataataaaacataccttgtacttttatggaaatgggtagggaggggacaataaaagtaaagttttaaaagttaatttctttgtgctggattttgtggaacacatctttagcccagaattaagaagcataaataggtagatctctgtgaattcaggatagcagtctacacagaagttccaggctatccaggatgacacagaaagatcctgtgtgtgtgtgtgtgtgtgtgtgtgtgtgtgtgtgtgtgtgtgtaagggagtgtgcatcacaccacaatgattgtgtagaggttagaagacaatatgggcagaagagttctgtcctttgaccatgtgggtctcagggatcgaactcaagtctttaggattctgaacaattccagcaaacctgtctagacatcacacttggccttctgtcttccttccttggtccttagacaacctcttttgcaatttcaaagcttagcagtcatgttcatattttctgatgctaaacagaaatctcatactacttcactaatttaaaaaaactcataaaacttcttttaggatctttatctcttaagcaaacaaacatgaaatctcactatattcctgaaacatttaggtagagaataaattttcaagcaaaataaacctaaaatttcaaaatcctacttattaaattattaggatagaactagcattttgccacataaactgaaatattttatataaagagtgtatttgtatttgtacatgttcataggttacattgtagtgttatatataataggcattttaacatactagttaatatacagagtctacttcatttgaatgaagattaaacgaagtgatgtcagcagaatagtctagtatcatagcctgtagtcctcccacagcgagccaggcttcctatttgtccacgtttgcaaaggctgaccaaatcccaattcaattcggatgataccttatttgtatttgtacttttgagctgtaccactctgttttgttctttctctctgcttctaaaagatggtgctgaagcatttcatttatagagtgttttagcaaatccctaattttgcatataaactataggtagaagttgaatgctaacttccaagaaattatgtcacccagggtcatcggtagagtctgttcactggcaagcctttaggtgccaggcacgtttaggatttagacattctagaactttgaggatttcaggctacacagatatacagtgtcacaattagaactgaaagcaggatcctctgtatttctaaacagttgaagaagcaaagaataggagcttattaatacaatcttataagacatgttgctttgagttgtttaaacacaagtaaaatgatcaactgaaactccaatagaccaacttaactgttaatgatagtcagtggtccttatgaccaatgacctggtcacattgatttcagttacttcaataggaagcatttcatttcctcctccctggtgcatgcatttacagcttctacaaatgcatacttgattggaaagactgcttttattttaagtcaaacattaattccctcaaaagaattagtctaagctagttacctgtggtccctgatacccttggctactgggagttagatgctggattgtgttggcctgaggtcatttcagatgtccaagaaagatgaaaaacctagttgcattactatttgtaagtttttattggttttcctgtatgtgttttaaagaatgacagttgtgattgaacattagctatgcacaattgaaagaaaaaaaaaaaaaagccgggcgtggtggtgcacgcctttaatcccagcacttgggaggcagaggcaggtggatttctgagttcgaggacagcctggtctacagagtaaattccaggacagccagggctatacagagaaaccctgtctcacccccccccccccgcaaaaaaaaacttgatccaaaaatggccatggtgccgtatccttgtactctcagcagtgaggaagggacagctcagtgtcgcctcacatattggtttcagccctagagtcccagagtcaatgattgctctcaggcaggctagtcttctgaccaatagaaacttgacactgtgataatgcattaggtggccttagaaaactaggacaccaagaaggaatgcagaatccttccacctgagccagaaaacagaactcaaaggcaaaccgtatacagaatattggtatatgattataacgatcaggtgtatctctggttattgaactttatgtcaataagaaggtctaactattgttgattatatcaataaaacatgcatttacaaacctatgagcgctcgctggtaccaatgcaatgcttctttgtctatttttgtttctggggcaccatctgagattcttttttcacccatttcagaataaaatgggttccattacttgaaaaccactgtctggctaataggcactttgtaagcagactacatttgtggtgctttaagaatgtggctgttggcaaagggaagaagagcagaattgtatgaggctagcttagagccagcacattgctttaaaatatatgtttctctttaattcttctcttattacatgcagagtaatgtatagctataagaaacccagctactaacgttgattcacattgaagttttgcatgagtaatggtggtttccttaagagtttaacttacttaaaagcagagtttaaaacttttttccttttcctttctttcctcttttcccttcccccttcccctttcccccttctccctttcccccttcccttccctttgcttcccttttccnnnnnnnnnnnnnnnnnnnnnnnnnnnnnnnnnnnnnnnnnnnnnnnnnnnnnnnnnnnnnnnnnnnnnnnnnnnnnnnnnnnnnnnnnnnnnnnnnnnnnnnnnnnnnnnnnnnnnnnnnnnnnnnnnnnnnnnnnnnnnnnnnnnnnnnnnnnnnnnnnnnnnnnnnnnnnnnnnnnnnnnnnnnnnnnnnnnnnnnnnnnnnnnnnnnnnnnnnnnnnnnnnnnnnnncctcgcacccccccaccccccaacgaggatgtttccaccccaagtttgaaactttttttgttgttgttttgtttttctagacagggtttctctgtctagaaactcactctgtagaccaggctggcctcgaactcagaaatccacctccctctgcctaccaagtgctgggattaaagatgtgcgccgccatgcccggctaagtttgaaacttctaattgggccaaatatagcaaaagtatataaaatggaatagcagacaccctcacattaccacctagatgataatagttcttagcactttggctactgccacagctctgcctcatcattttcccagtttgttcctctgttctcccctccacagcagtaaatgctggtctgaaggcagtgggcattctcctgaatcttagatagggcttctgcatatctgtatgttcatatataatacactgtgctgcttaatgtgcagaacttaaaataattgggaaagggaggctggggagatgtcgcagcaatgaagagcactcactgctcctctagaagacctgattttagctccctaaattcatatgttggttcgcaattttaactccaattccaggggattgacatcctcttctgggctctgccggtactgtacacacacgatgcacacacatacattcaagcaaaacattctcatacagaagaggacaataaatattttttttttaaaaaaagtaaataattgctatttcttgaaagtaaccatttacaattgaatttttttcattgggtaaattttattttttaacaaagtatggtgtcctatgacacacaaaaagcagtggccatgacaattttctaacaaataatcagttgcttccttgcttctgttggtgctgtgctatcaatacgtttgtgtggaaccatttgaaagtttttctagattagaatacagacacgtactgggtcaactacaacatggagtgctaccaggttttgtgggtccactcgctttagccaccccctcacattgcaagtttctatttcctgatatgaactagtgtggtctgtcttctgctatcctaagccagctggatggggtgccacgggactttttgtggcattaacttacatttacccaactgctgaggctgggcatagtttttcttatttattttctactcagatttcacttctaaaatgaccagtacaatctttgtccgtttgtggtctgcgagtgctggtcttaaggagttgactacggtgtttccaaatagacctttatataaatattttcacattatattcttgattcactttccattgtcatttggcttcagtattttcaaagcactttctctttttcacgtactttcaagttattctcttacatttctttcactaatttgaaagttttaattttcatataagtcattaatccagttagacactctgtatcataagatacatgtgtgtgcatgaaggaggctgggattcactttaattcctttgaatggaggcagtcaatcatcttagcattgttgattgggatattttttgtctatctcatcctgcacttggcttgccttgtccctggtgcagcttgtcatgtttttgtgatcaggggcccctacacctctgtactttgttctattaccaggtagctttgactgcttgcaacttcgtaacgcgactttatttctaggggggcggaatccatttctggggcctctcctcaaaaccctactcctttactcttctcctcttcctttttttcattcttctcattgcaaatcagctttcttagtcctttattctaccatatacacttgaacagttgcttgccaaatcccattagtattttgcttaaaatagaattttaatgtatggcttaactttttgtggagattgctttcttgaggttattgactatatctcccatgagaacattagaacattagaacattgattaataaagctttatcatttttccttaaaggctttgtgtatattgcttagctagctcatacttttgtagtcttcgtaaatagtacctttcttagctgttagtgtactatttgctgagtgttttctcacataaaaaaatacttgtaagcctacattctgcaaagatagaaatattttgtgaatcaaattccccttttgcatatattaataaaaagaagtatcaaagagataaagacgttgactcaggttctgtggggacagctagctatctggacatcctaggcttttactctgttttatctaaatcttcctattttgctagcatcttttcttttcagattagtcagtgtttctctgattcatactaccttgcttagcaggatctttttatggtaagaaactcaaatctcatttcagacctttcatgaacaaggcatttaatttactaaatagatgtccttaataacaattagctaattcatttgggcaggcacattcatggcaacgaataagtctactgaataaatgttttctctggtcattatctttagttaggttcttaaggaaaatgccagtcctaattgaattagcttataaaaaaccgtattcactgaattaataatactcgtgtatatgtagggtcaaggccccttgaatgacagacagctgtgaaggcttgtcctagcactcagtgtgtatctccagagaaaagaggcagtgttcacatgctatgctgaattccacatgcattttatggcttttttagtgggcatacaattatttttcttatttgtagttaagatattatattttattgtgtatacatcattttattattacatttgctatgcaacaattattctttttatggctaagtggtactttgtatctatgtctgctcatccactgagtgacacctagatgattactaccctggctcctgtttattgtgctgccctaagcactagagtacaggtgtcttttcagcataccagcttcatttcctttggatatatactcaggagtgaaattactgctccatatggtagttctatttctagcgttttgagaaacttccaaacaattttccataatgtctgctctaatatgacatctccaccaacagtgttgaagttccctctgattcacagcctctgcagcatttgccagtttctgtattttttaaaaatagctgttggagagtctgggaatggcggcacacacctttaatcttacgcttgagagcagaggtagagagatctctgtgagcttaaggctaccctgctctacaaaggaagttccaggacagccagagactcttgtctcaaaaaaaaaaaaaattaaaaagataaataagtgagaaaaagaaagaaagaagaaaggaaggaaggaaggaaggaaggaaggaaggaaggaaggaaggaggcagaacaaaagaatgaaataaagaaggagggaaggaaagaaaacagcctgttgattagttaattccttactgtgtaaatattaatacttttaaaactgagcgtatttaattcttactttaaatgtgccacttctagtgtcttctagaaatgcccctttaggttctaatttctcttctggcttcagcagaagagagaaacgaagggaaggaggctggagtggagcctctgtgaaaaccagcatgctctctgatgtggattcctgggctggtcgactgtagctctgagtctatatcctttttctctgaatcatctttctggcttcctcttatataagggggcttttctttagggctggagcaggtgattttctgggaacatatcttgacagagcttgaggctcaaagcccagtagtggtagatgtctggggcactttgtaacttcgccctgcagagtgttggagcatgactgcttgtacttgggagtctctgtagaagcatgcatcacttgtggaacattagctccgttttcaatgatacctgtgctcaatacaataaagattcactggatcactgaaggttatggcttagggaagggctggagacttaacttgtgggagaaagattactattcttgtcttttaactcctaagtggcctatgagctttagttcttttttttttattcttttagttgcattttgcctcttctttcaggttctgccatgattaaaatatttattctattcactgaaaaagcatatactgagtatctcttaggctttggtgatgaactaaacacagaagacgctcactcttccccagcacacattcctgtgggtgtaggaagcagtcgcttttagaaaatgaacaaagtattcatttttacttagagttggcataaggcagtcatgttggtagagtatgatgtgtatttctattttagtttattccgagagcactgctgtgtactctagatttaagaatggaccaaaataagatttgtctagcttcaagcttacaataaagcacatagaaatgaaagacgtatagatggatgtacctgttcttgagagttgtggacttacacggctcttggttctctaaccacatgagtctcaagagacattctaattatgcagggcttctgctgccaggacgtgtgctgcctgtagcccaggcctgtgttctgggtctgtgttctgcttatgccaactctggatcgacttatattcccctggaaggccctggctatccatcctggccaagattgctgtgaagcacaaggggctctctctttaaaaagaacaaaaggaagccagatcatagcactgtagagcacagaacaggcagtactaaagccctgaagcatgaaagaactcggtgtgttagagaacaaaagggaacaggacattgggctggcgtgggtggggtgtcagacatgagtgtaaatagtgactcgggacacactgggctgagtcttcttaaaccacggtaggaattttgtaagtattacggagggcctttagtttaacctgttgtctatgaacgtgaatgaaaatcagcttaagattactccatcaggaaggtacccatcaagcgataagcatcatataaacagcagatgaacctttggaaccaggaggaaccagagctctctcctactcttatcttattacaggaatcttaaaaatatcactcatgatcactctattttattagaagtcattatactttactagctcttagacctaaaacctattttctttctttttttataaacatttctgggttcagaggtcagtatcttaagcctatgaaacaaacccatgctgttatctgtttgtgcatgttaagattcccgatgctttgtggctcacaacacataaaatactgtctggctctttataaatgacgtctgcacacccctttgttgctaaagtagagcatgcactactaggagacaatttaaaaatattcaagtagccatttgacttgtttgcaagcttataagttttattttacgcactcaaaaacattgtttcggcatgagatccatggattgcagattcctgagacatccaaggtcacaaaggaaatgaaggagagtccccatcacggtgtcttaggcaggagtttcgaaggaatgggctgacctatgcttggttactctgaaactcatgccttcacccatggcagttcctccatcctcagagtctgtccctaaactgcctctgctttgtgaatatagctgagtacacgcattgagtatgtcaatcagaggtctggtttaatctagcagtagtgctatgtagtgtgattgtgactatcttcatttagcttagggatgttatacacatgcagtcatcacttcatacctatgttttctgcattcatggatccgaacagctttcaaagtacgattcacgtaggacctttctcccttgtctacattctctatacagtacaatccaacatccattttcaacactgaattattatcataagtagtcctgatttaaggtatacaagagggtgtgcagaggtaagatacaaacgctgtaccatttttagcatgtgtcatgtgtcgcaaggacgtcctctgtcatcccacatgaatcaagatgatcactcacagactttgccacatgccaattctgtgtaggccattttgcaactaaggtttcttcttctcagttgccttctaggttgtgtcaagtagacaataaattctaaccaggagtggactggggagatggctcatcagttaggagccctgtgtactcttcaaggtgatttgagttcaagggtatcctataccctcttctgatctctgtcagccttaggcatgcatgtgatacatagatatatatgcaagcaaaccacccacacatataaaataaataaaaggattaaaatgcaaacaacaataaaactaagcagcaaaccatgctgtgccagccttctgtgtgctaggaatagtgaatgctcagatgacaaagctgctatcactaaagccagggactgagtcaggcctctctgacaccatcggcttggctcaacacaaggaagaatgctctaatgctcagaatttcatctgacagtacactagctcacacctggaaatttttcttttcctgaattttccatcattttgttccatagctttccagtgtgaaggactgcattccattttctgtctgtagacttgttggcactggtgctacccagaacaggatgtggagttggtcctttccaaactgttagagtccctgtgatcactgctaatgtcaccggaactggccttttagaatgcttcttccaagtgtgagtttcaattttctagatgtggctgaggaactttgtggggtttctgggagtacaggttctaacttgccatcataactcatttaaaccttagcctgtgccctttggttgaaggtagattaaagttgatggtatcatctggggctgacaattaggtctccatttcggtgatattagactgttccatgtttgtttggagttcatttggattcttctgtccttaaccttaataatcactctcttataaaacgtgggcaaggcattgtgtgccaggcattcttcttattgtcatccttcccacgttgcagaagaagaacacatacataagttcaacccatggggcatcagtatgtcttcagcatgtgcacttagagttatattccagtgtggcttgctatcatttcccatattctcatgcaatagaaaatcctgtattctcaaacattaaacattcctctacagtagtactttagtgaccatattacagaactagtctgcttggctatcaattctttaaatttctctttgttccaaggaacatttggaagacttactataccagtcaaatgtaatcagggtacagaaaacatatcaatggtgaaccagtaggaattcaatttctataggggtctactagtaaaagctgggtagttaagactatcagagtgaaagggactctgaagagcctagacggaatagttgcacagaagtggctgtggcccttagtctttggaagaagatctgcagaagcctacactcaggagtgagcaccaccgttccctgtgtagctctgggaagagaggcatctccaacagcccaccattcacagactggtcagaggaaagcaatttgaacagtggacctgtgctagaccatagagctgttttaatgctggaggattgggttgcagagcttcttagaaggggtttctggtaagagtcagtctaagggtttaggggcatgtaagatctgatagcattcacatgagataatactggggaaggaggtcttcattgtcctctcctggtgaagcatcacattgcccccagctggccaagggaaaggctcaggtctggcttccgtgcctaaaagcagggcaaaggttttgagttgaaacaagaagaaaatgactaatctgtgcaggttggcccttaccttcttactctgctttaactatgggtataggaacatcttttatgaaagattacctgcaccttcaatttttctttaacataaatctttgaatagatgttgagtttgagcgttttaaaggcttttgtcagatgtgacaaaatttatacaccccccccccccaaatgtgtccttgttgactgtccttcatgccccgtatggaaggaaagggatatttttaatatcacggaactcactgtctattcactcttgggatcttctcctcgtgtcttggattgcacactatgatagaggggggtgcttagggcctgtatctctgtacacagttgcacaagtcctttgtcccctggcttagttttctgaactttgcccctcccagtctaattcacccatctgacagatttatttctctaagattccttcatcatatcagtaatcctgctcaagagccttaaatatttcctctctgcttgctctagtaagaataagatacagagtattgacgtttggcactgggccctttgcctccttctgctgataaggaaacaagccgatttagcagctggcccaggcccaagctggagcttccttcctcttagtccattgtaccatcccgagcgcggttagtccagcttccttgtcccaccgctgttctccagcacagcacctgtccccagagagatttgactgacagttgacctcaccatctgctgctcccactttgtctttgctggtgccactcacccagatggaatgctaacattgtgtgatcttcttcatgtagacactgcctgcactcacttaagtattttcacaatcacatctagtctctattaagcaaattacattggatagcatttcaggatgttagatgggcagggttttgaaatacattgtacttgaatttaggtccaaggcccggcacttcctgctctgtgaaaataagtttactttcccactttggggcattagtagacgttgaagaatgcctgttcctttaagacaagcttgtttgtctccagaaaaacatgttgttctttatctctggctttactcttgattaaaataccaaaggatataggcagtctcctcctgcctgttcagctactcagattgcttgatctaggacaccagtgggcttctgggagctgctgcctcccccatccaatccttcagacccagatcttacagaaactactgtctgaggatgtcagttctgtgcgaccttaccatctttcactgcggacttcagatcttttgaacgtaaacatctctgccaataggccttgttcttttttgtggtgttttcagttttcagacttgagaactggattattagactgtaggtgaaagtatgaaaatagacaagtgagcatgacaaagtggaggaagaaactgccaagggcaccttcactgggcagaggtgacagctggcgtgggaagtgtagcatctctgaccatcactctggaacatgtccgttgtaggaaaagggctactttattcttcaaccccacttctccacccccagatcactgggggtgcattcatatcttactttagtgtatttcatacactccttcctaaaggtcctctgttgtcttccatctacagacgttgctctgtagcttagcaactgatgtgtcatattactactgcccttactggcttcattaccctcaagatgggagagtgaagcaaatggacatatgataaactaatggggccgtgtttatattcagagtcacttactgatgcttaagtaaaggggctaaagaacagtgttaccttggagtagaacatctaaaatcagggcctcctcacaactgaaagatgcaacggacaacagtggagagaggaggctgcaggcggccatggaggtacctgcctgctaagggccaagccttctaatactggcagtgtctggatttcctgaggttctctgctgtctttggtaagcaacagatgaggcacaatttatggttttgaccagatgtaattctagattagcctaagtagaacattggtgtactaaggaaaatggattctggaggagatgatatggcagcaatggcatgcctcctcaggatcctaccacccaggcctcacagcggatgagggaggaacagaaacatagacatctcgcccgggtgagcgctgactgcaatggctgtgtgggtaaatccaccagcagtagtggctgctttcccctgctgcttgtcattctttccatgcagtgtgtgcaggcccggcaggtccctgcagagatggtctttctgcctcctttctcttttttatttttgaggaggtggtatgagggagcctgtttaccgcagccagtgttatttcggggttcaaagtgactgttctaaatgtgtcttatgatggtctgtttttccttttgtagaatttaaataatttctttttgttgttgttgttttaactgacacataaaatcatagtagttacacatgattttgatactatatgatgttttggtgtgtgtatgtgtatgctcgcatgcatgcgcacatgtatgggtacatgccatgtgtgcaaaagtgtttgtgtatatgtacctgnnnnnnnnnnnnnnnnnnnnnnnnnnnnnnnnnnnnnnnnnnnnnnnnnnnnnnnnnnnnnnnnnnnnnnnnnnnnnnnnnnnnnnnnnnnnnnnnnnnnnnnnnnnnnnnnnnnnnnnnnnnnnnnnnnnnnnnnnnnnnnnnnnnnnnnnnnnnnnnnnnnnnnnnnnnnnnnnnnnnnnnnnnnnnnnnnnnnnnnnnnnnnnnnnnnnnnnnnnnnnnnnnnnnnnnnnnnnnnnnnnnnnnnnnnnnnnnnnnnnnnnnnnnnnnnnnnnnnnnnnnnnnnnnnnnnnnnnnnnnnnnnnnnnnnnnnnnnnnnnnnnnnnnnnnnnnnnnnnnnnnnnnnnnnnnnnnnnnnnnnnnnnnnnnnnnnnnnnnnnnnnnnnnnnnnnnnnnnnnnnnnnnnnnnnnnnnnnnnnnnnnnnnnnnnnnnnnnnnnnnnnnnnnnnnnnnnnnnnnnnnnnnnnnnnnnnnnnnnnnnnnnnnnnnnnnnnnnnnnnnnnnnnnnnnnnnnnnnnnnnnnnnnnnnnnnnnnnnnnnnnnnnnnnnnnnnnnnnnnnnnnnnnnnnnnnnnnnnnnnnnnnnnnnnnnnnnnnnnnnnnnnnnnnnnnnnnnnnnnnnnnnnnnnnnnnnnnnnnnnnnnnnnnnnnnnnnnnnnnnnnnnnnnnnnnnnnnnnnnnnnnnnnnnnnnnnnnnnnnnnnnnnnnnnnnnnnnnnnnnnnnnnnnnnnnnnnnnnnnnnnnnnnnnnnnnnnnnnnnnnnnnnnnnnnnnnnnnnnnnnnnnnnnnnnnnnnnnnnnnnnnnnnnnnnnnnnnnnnnnnnnnnnnnnnnnnnnnnnnnnnnnnnnnnnnnnnnnnnnnnnnnnnnnnnnnnnnnnnnnnnnnnnnnnnnnnnnnnnnnnnnnnnnnnnnnnnnnnnnnnnnnnnnnnnnnnnnnnnnnnnnnnnnnnnnnnnnnnnnnnnnnnnnnnnnnnnnnnnnnnnnnnnnnnnnnnnnnnnnnnnnnnnnnnnnnnnnnnnnnnnnnnnnnnnnnnnnnnnnnnnnnnnnnnnnnnnnnnnnnnnnnnnnnnnnnnnnnnnnnnnnnnnnnnnnnnnnnnnnnnnnnnnnnnnnnnnnnnnnnnnnnnnnnnnnnnnnnnnnnnnnnnnnnnnnnnnnnnnnnnnnnnnnnnnnnnnnnnnnnnnnnnnnnnnnnnnnnnnnnnnnnnnnnnnnnnnnnnnnnnnnnnnnnnnnnnnnnnnnnnnnnnnnnnnnnnnnnnnnnnnnnnnnnnnnnnnnnnnnnnnnnnnnnnnnnnnnnnnnnnnnnnnnnnnnnnnnnnnnnnnnnnnnnnnnnnnnnnnnnnnnnnnnnnnnnnnnnnnnnnnnnnnnnnnnnnnnnnnnnnnnnnnnnnnnnnnnnnnnnnnnnnnnnnnnnnnnnnnnnnnnnnnnnnnnnnnnnnnnnnnnnnnnnnnnnnnnnnnnnnnnnnnnnnnnnnnnnnnnnnnnnnnnnnnnnnnnnnnnnnnnnnnnnnnnnnnnnnnnnnnnnnnnnnnnnnnnnnnnnnnnnnnnnnnnnnnnnnnnnnnnnnnnnnnnnnnnnnnnnnnnnnnnnnnnnnnnnnnnnnnnnnnnnnnnnnnnnnnnnnnnnnnnnnnnnnnnnnnnnnnnnnnnnnnnnnnnnnnnnnnnnnnnnnnnnnnnnnnnnnnnnnnnnnnnnnnnnnnnnnnnnnnnnnnnnnnnnnnnnnnnnnnnnnnnnnnnnnnnnnnnnnnnnnnnnnnnnnnnnnnnnnnnnnnnnnnnnnnnnnnnnnnnnnnnnnnnnnnnnnnnnnnnnnnnnnnnnnnnnnnnnnnnnnnnnnnnnnnnnnnnnnnnnnnnnnnnnnnnnnnnnnnnnnnnnnnnnnnnnnnnnnnnnnnnnnnnnnnnnnnnnnnnnnnnnnnnnnnnnnnnnnnnnnnnnnnnnnnnnnnnnnnnnnnnnnnnnnnnnnnnnnnnnnnnnnnnnnnnnnnnnnnnnnnnnnnnnnnnnnnnnnnnnnnnnnnnnnnnnnnnnnnnnnnnnnnnnnnnnnnnnnnnnnnnnnnnnnnnnnnnnnnnnnnnnnnnnnnnnnnnnnnnnnnnnnnnnnnnnnnnnnnnnnnnnnnnnnnnnnnnnnnnnnnnnnnnnnnnnnnnnnnnnnnnnnnnnnnnnnnnnnnnnnnnnnnnnnnnnnnnnnnnnnnnnnnnnnnnnnnnnnnnnnnnnnnnnnnnnnnnnnnnnnnnnnnnnnnnnnnnnnnnnnnnnnnnnnnnnnnnnnnnnnnnnnnnnnnnnnnnnnnnnnnnnnnnnnnnnnnnnnnnnnnnnnnnnnnnnnnnnnnnnnnnnnnnnnnnnnnnnnnnnnnnnnnnnnnnnnnnnnnnnnnnnnnnnnnnnnnnnnnnnnnnnnnnnnnnnnnnnnnnnnnnnnnnnnnnnnnnnnnnnnnnnnnnnnnnnnnnnnnnnnnnnnnnnnnnnnnnnnnnnnnnnnnnnnnnnnnnnnnnnnnnnnnnnnnnnnnnnnnnnnnnnnnnnnnnnnnnnnnnnnnnnnnnnnnnnnnnnnnnnnnnnnnnnnnnnnnnnnnnnnnnnnnnnnnnnnnnnnnnnnnnnnnnnnnnnnnnnnnnnnnnnnnnnnnnnnnnnnnnnnnnnnnnnnnnnnnnnnnnnnnnnnnnnnnnnnnnnnnnnnnnnnnnnnnnnnnnnnnnnnnnnnnnnnnnnnnnnnnnnnnnnnnnnnnnnnnnnnnnnnnnnnnnnnnnnnnnnnnnnnnnnnnnnnnnnnnnnnnnnnnnnnnnnnnnnnnnnnnnnnnnnnnnnnnnnnnnnnnnnnnnnnnnnnnnnnnnnnnnnnnnnnnnnnnnnnnnnnnnnnnnnnnnnnnnnnnnnnnnnnnnnnnnnnnnnnnnnnnnnnnnnnnnnnnnnnnnnnnnnnnnnnnnnnnnnnnnnnnnnnnnnnnnnnnnnnnnnnnacacacacacacgcacaggcacagacacacacacaggcacagacacacacacacacacacaggcacagacacacacacacacacacacacacacacacaggcacagacacacacacacaggcacaggcacacacacacaggcacaggcacaggcacaggcacacacacacaggcacaggcacacacatatacagaggcacacacacacaggcacacacacacacgcacacgcacatacacaatgttgatgcttggaagaatgcatccaggaggactgaggggcagtagagtgactgagaggtgcccagcctttgacatgaagccactctaggacagaattcccccacagctatgctgatctgcttattgacaggacatgtccctattaatatgtattatcctgatggaatgtgctaatgtctttagggtaatatagagtatactgtgaaatttacttatcaggctgtctgttagtcatttttcagttgctgtgttaaaataccatgactaaaagcaagtttgggaagaaatgttatattttggttcttatagttccagagggcatatgagttgtcatggctgtgaaggtatggcagcaggcgtgtgaggctggcctggtactcaggaagtgagtggtcacattttatgtgtatactggaagcagagagatagcaggaaatggggcaaggctgtggaaccacaccccctactctagtgatgtccttctagtaaggttctgcctcctcatggtccagagctttctccaacagtgctaccagctgggcaccaaatgttcaaacacatgatgagcctacggggccatttcccattcagaccacaactgggtacacacaaggactagctataaacatgaaaggactcggcagtatgtcttgtgggtgctatttttgtgtttagccgtaaacattggactttttcctgtgtgttttcagtgagtgacttctattttaaacagcattggtggattagccattgagtccttctaatgacctggggaagcggggccagctgccatccatgcaggttgcagcagggttcaagtttccactctgggcaggcggctgctaaatgagtccctgtgctaccatggtgggagttgtgaagctgcaacaacacaacctttccccgtgttaatgaattttacagccaggatgcaagaggtggggtctggttggtcttcctgataggatgttgtcccggcagcaaggctgtatgtgccactgacattctttctgagttcagtttgccttgtctcgggagctaaaagtttgtaatgagttagctcttctgcctctccctcctttcctgtcccatcctgtcccccaccctcatctctatccaaaatcactgattagaaagagttagctgttgacccaggggcatgggagtgtgacagctgtcatagtaagaacaagagaaactgctttcatttcaagtggacaaaccaacctcttcctttcttcatagaagtcttgctctgattgcagaaagtgaagaccccacacaggagcctgggggcagatttcgttctctcccagtccagctcctactagaacccctggaacctcttgcaggtctttctttaacttccttcccacttctttgatctcataaaagcttgctgactgttgggagtgctccaggaaggaagccgacaggatggacaggcagagcagtgtgggatcacctaggacacagtcctccagtcttgaccctggggttggatcaagatggctctggtttctgatctttaaaatgtgcatagagttattgtggtggttagataaacactaaagacaaacaaacaaacaaaacaacaataacaacaacaacaacaacaacaaaaactttagctcaatgccagagtattagcacttaaaaaaaacagaataaaatacccaactcccccactctaattttttcatgagaaaatatctctaaatttttctgttttctttctcgaattggaaggcgtagatccagcctactttttctctctttggaacacggctgctcagtctcacctgatctgaggactttctgagagaccactgttctccagaatccctaattaagaaggatttcagtttcttctgactctgtctcctcagtgtactcagaggctggccctggaggagagattgcggatatccagctccctcagtactttgtaactagtgtttgcagctagctggcttcctcttcagtctcctgcatgcattaagcttgaaaggaagtgaatgaacactgctcttcccagccagcctgccctgtggccactgcttgtccctgtggtaataaaacgatagtttcctataggtttctgtggcttggtgtttctgggacgtcctaaatagtgatgaagnnnnnnnnnnnnnnnnnnnnnnnnnnnnnnnnnnnnnnnnnnnnnnnnnnnnnnnnnnnnnnnnnnnnnnnnnnnnnnnnnnnnnnnnnnnnnnnnnnnnnnnnnnnnnnnnnnnnnnnnnnnnnnnnnnnnnnnnnnnnnnnnnnnnnnnnnnnnnnnnnnnnnnnnnnnnnnnnnnnnnnnnnnnnnnnnnnnnnnnnnnnnnnnnnnnnnnnnnnnnnnnnnnnnnnnnnnnnnnnnnnnnnnnnnnnnnnnnnnnnnnnnnnnnnnnnnnnnnnnnnnnnnnnnnnnnnnnnnnnnnnnnnnnnnnnnnnnnnnnnnnnnnnnnnnnnnnnnnnnnnnnnnnnnnnnnnnnnnnnntagtttcctataggtttctgtggcttggtgtttctgggacatcctagcatagtgatgaagggattgtgttgggctttattttttactggggatgggtttcaggcttgtctttgtgtgacatgaagtatccagaagtacttttctatttttaaaattttattagatattttctttatttacattttaaatgttatcccctttcctggtctccctccaaaaaccctctcccattatccccttcctcctccccctgctcaccaacccacccactctcacttcctggccttggcattctccttcactggggcatagagccttcacaggaccaagtgcctctcctcccattgatgaccaaataggccatcctctgctgcatatgtagctgaagccatgagtcccaccatgcctactctttggttggtggtttagtccctggatgctctaggggtactggtgagatcatattgttgttcctcctatggagatgtgaaccccttcaactccttgggttgattctctagctccttcattggggaccctgcgctcagtccaatggatggctgatagcatccacctctgtatttgtcaggcactggcagagcctctcaggggacatctatatcaggcttttgccagcaaacacttgttgttatccacaatagtgtttgagtttggggattgtatatggaatggatccccaggtggggcagtctctggatggtcatgccttcagtctctgctccacactttgtctctgtaactccttccatgggtattttgttcccccttctaggaaggatcgaagtattcacactttggtctttcttcttcttgagtttcatatggtttgtgaattgcatcttgggtattcaaagctttggggctaatatccacttatcagtgagtgcataccatacatgttcttttctaattggcttacctcactcaggatgatatcctccagatccatccatttgcctaagaatttcataaattcattgtttttaatggctgagtagtactccattgtgtaaatgtaccacattttctgtatccactcctctgttgagggacatctgggttctttccagcttctggctatgaataaggctatattataaataaggctgctatgaacatagtggtgtatgtgtccttattacaagttggaacatcttctgggtatatgcacaggagaggtattgctgggtactcaggtagtactatgaccaatcttccgaggaaccaccaaactgatttccagattggttgtaccagcttgcaatcccccagcaatggaggagtgttcctctttctccacaccctcgccagcatttgctgtcacctgaattttttatctcagccattctgactggtctgaggtggaatcttagggttgttttgatttgcatttccctggtaattaagaatgttgaagacttttttaggtgcttctcagccattcggtatttctcagttgagagttttttgtttagctctgtaccccattttttaatgaggttatctatttctctggagtctaaccataaatacttttcttttggaaggagtgctcaacctggcccctgacagcttgttctttgtagagaatttattgtgtataactagtgaaaattagccatggaaacaagtgatggatgggcctttgacacatcagggaggaatttcctatctcctctgcactcctgctgcatcgcagcctgtggcctgttttacaggatgtggaaaataagcctctttgtctcagctccttggggctatggccagggagagtccttctagatggccaccttctggagtctgagcagggtgcacactctggttggaagaactggactgatcagtgagatccaactttcactgctaaggatgctgagggaggccccatgcttgcttcttactttaagggatcacgcacaaggaaccagccgatgccctttaaaactgcaggtttattgagatatgctttggagaacaaaaatgaactattttagatatattcaattgtatttttttccattttatttggagagaaggtcaagtgactgatacaatgattaattttaaaactttttttgttgttgtttttgttgttgtttttgtttgttttttccgagacagggtttctctgtatagccctggctgtcctggaactcactctgtagaccaggctggcctcgaactcagaaatccatctgcctctgccttaaaaacttttttgatttgagtaaatatttctgtagatatcagtctagaaacttttatgtagacatgtttttagttctgagttatagaacttctaggcgcttttctctgattacacttttacagttattgctttgctttggattttggggtctcatattactattctttgagttaagcttctttgtagaagtaattgaaaattacacaaatgagaacagagaaaatcttagaatgctgcatagaatcaaggctgagttatagctgcctttttcttctcttatcaagcttctacttaaaagatttattaaagcttttctttcatcttttgcagaatcgcaacgaaataaaaaatggcacgatccttcgattaaccacatctccagtaagttgatcttagcttatggcttttcattaaaatccccccaactctggtctgcactatgtaactgtgggtagggaccaacaagtgtgacttctggagaatctgggtacagtaacctcccagggaggctctacgtgcccgggagcagtctaccttctcttttctacaacaggggcgacattgtctcaggacaatggcaagtcaatggatggtgaggacttcacctgtggcagtcagcccagcagccattctcacagtacagtgggagagtggctgtctgatctggttagcccattttacctcatgtcataggacagatacaggcaatgaaaaaacagagcctactattgcctttcctctgtgtgtgtaggatggggtgggtgggtattggattattctctagcctgggtctgttattaaagcatttcctaaaaccagctcaagagtattgcctgcttatgctgttttcctctgggttgatctatataaaacgtttgaaggtctctgaatagaagctgctaaacaagatgccgaaatatatttagattatagctgggatcgtgatctctcttatgtgtggagatgctgcatagcaacattagcatatttaaagtacatttctccaaaatgcacttccttgctttcctgaaaaataacatgcacaaagtaccccaagtgttactattttcacactgcaaatgtgatgaaatgtgtatcgtctatctatcattctcagtttccactgcagccatgtgctaggctaaaaataaaattaaaaattggggaaagcatctggctacaatcaacatgtgggtactgtagctaccacaaattcttctcattgaaaattacattaaagcctgaaaaacccaaacattttaccccgagccatcttgaacctaacacagggatgagctctgtgggctgcctgctggacttggtggagccgtcttccagtgccttcatgccaggcatagatttgcatctggatttgactggctacaatatgagctgagccgattttcatgggcttttcacaggccttcattcatcaggtcgaattgctgctaacttgaccttagaagctaccacgtcattaggtttctgggcttctacttcatttgctaatttccagcgcagcaaggcttagtgctgtatctaggctggctctctgtgctgctgccctggcttcctaactatattccatatgcagtgatgatgtgaaagaggaggggaaactgtccaacagagggagtactgagagggagcgggagaggtaaagggtgtgggtaggaatagtctcagtgtacactatgcactcccatgagaacaatcccatgcaaaaaaaaaaaaaaaataacaaagggctcagtgtaagggagagggtttttctgtaaagagaattttttgataagttgtcatcagagacagtggatgtgtccttgtcaaagaatgattctcaaacttggggttctgggaaagatagtcaagggagtgtacaagacactgttataatatagtccattcacaagggaccactgcatattctatagtagtggcctctacactaggacagctgtgggacttagagatgctgatgttagccttgcaaatggggcaacagagtgtgagaatgcggcccaggcacctgcacttacgagagcctcttccgattgggctgaagccacagggtctataactaggtgttagtgcacagcagtttatatggaaatggaaagttttattcattgctgaattgttttctattagtttgtatttaaatgaaaacgggtcatacaggccatctcacttcaaacaataaatttatttatgtttttgagatgggatctctatatcatcctggctgctgtgttcctatgtagcctaggctggacttaaactcatagacatttgcctgcttctgcctcccaagtgacctaattaaaggtacacgctaccatgactggcctgacttgctttttgtgtatataataaaaaataaagaagtgtctacatcaaatttgttaggcagtattagagtgctataaagaaaccagtattgtttttatataactcttttatatgaacttccttttcttcagtggttgactgaaaatagataacaacatatatacgtgtataccaagttacgtacatgattttagacatagactcacatggacacatgtatgcgtgcacacatgcgcacacatacacacgcaggtgtggtacagagtgtgtgcatacatatacgtaggctccagagcaggcctgccagcttcagtagaagctgacttgtgcccctgtccacctgccctggtcatacgcagaacctgactctgaggacatgcaccatatggaaaacatgttgagtaaattcctattataggagctattatcaaaaggttgatacatttaactatccaaaaataaaatcttcaaaacctttgtgtttggaaataactccagctacagcatcaggaatactatatcaaaaaagaagtggtagtctgcatgacctagggttgacttctaatttacataatcctttatgagtgcatagagactgctttttaatatgtgtggtcataggtatagtggaagcaaaaatgagaaattatgtatctgtatgtgcatgcatacatgtagaaaggtctgagtcttttttaaaaaagggaacagtttatgttctaattactgtgagcagaagatgctgtggatgagtatggactgaggtagcactggcatgtaaccttgctgtttccatccaagcacattacatacattaactttggtcttaattctcctgttaagaatgtacctgatgagtagatccacaaaaccacaggaccacacacatgtgcatccaagcggttcttcaactgattaaatctggaacccagttatcatttgagtaagaacttagcgtgtagcactctagaggcatctctaaggaccattactaagtacaaaagcagatggcagaacagcgtgtgtacaacaatgccttttctgattatagacatgaaaaaagatatattctaataagaggatccaaatgtctctcagaggtctccacaggtgcttagcagcacactagctctttactgcatagtctcttactgaagtacgcatgcatatctcctgtggtcgtaccccttttcattaaacttattatagatttatcatagtatgtagaaagtaaatcatcaggtcgacagccagaaacatttctgctttgcagtctatgtgactatgtgtcgagccattaaggcacatggacgagttccttctcctcctgctttctcattccgttccttgtttagaggaaaccctcactgctaattaagtacccatagtgccttgtggtcttcaagcataatcctcctggctgttctctggtgttccaggtccactctgagaatcatccagatcagaaggcctgtcacagtgattttgggggctagttcctatggtgataaggattttgatatatcagtcattctatagattctctcattacctatcattatcagagattgttatcaacaagaattgtagtattataaacctgcacggatttttaaatctgcactggtttgaaaagtgagtgggttctctctaactgtaacaggccttcagagagacatgatccataggagacaagaaagcagttctgctcactgggaacctagaacctggtgttggttcagacttctgcagtctgatcccaaatgctttattttaggcatatgtaagcatagaacaatttggggaaaacttctctggtgatcattaatcatgcatgcccaacaaagcatacataaatctctttgaggaacaaaatacactaaaataaaagtcagatgtggctacacagaaactttataaagtaggcatgacaccttccataaagaggttgtatagattggctgagaaaaacagacttatgacaagagtcctggggagggtccagtgttgtctctggccagacaggtagtgcaaaggtctccagtctagaaagctcgtccattcccagccttctgggtagataacaagtatttgcattctttctcttgaaggtacagcactgtgtgtttaattttccaaggttcgcctggtgcttatctgtgagcacaaggcctcagtgcctcccacacaaaaattgaaagagttacacagtgtctgtgttctattttccccagtgctttagaagcctcaacctgaagaacctaggtgagaggacagctggtagggtcagcgagggccaggttacatgttcccagcctcatccacatggaggtgcacatggaggaacttaggaaaagcggcaaagtgtaaatttaaggaattttcagaaacatagaaaaatctccctttttaattgactttatcgggctagaattatgctggatgtttggaagggagttacttgaagagcacagatggcttgttctgtgtatgtgtacattcggtcccttcctgtgtctctaggtgattcctcgtggatcactgctcccaagcccagcaccagtccatccattggaactatttgagtggcttgaaatgaaacttgttttctgtccttgaaacagtaccaggaaataaaactaactatctgatacgctccctgataaactcctaactgttctgagcctgaaaaatcggaaccaaggccatcttgcttttcataatcatggttctttcatctcaaatatgaaagcagtacagaatcattatggtgtaataaaaccaagcttgataccaggaaaattatcaactagtcacattttaatttgcaatatatatataaagtactttatttagtgacatctttcaaactccttgtgagtgccaggtactgttgcagatcctaagattctatttaacaagtctattcttctcctggagttgatgtgctagtggacacaaacatccttgtatgcatgtactctgcctttacaaacagactgactgcccttagtatgtttattaaaagctatacttatctatctcacacagctatattctatctcatattttcttggaatttggttagtaattccacatatgccatcctctgtcacatgttcaacatgaacatctgctgtgggaatgtaaatactactttgaggtctcctattcatttggtgcagcaggcatccacagtagatgtccaaatgcgtcatttcccagaagcacgtcacctcccaagaagtcccagctctccataccctggagcacaaaggccttgtgtcctgtcacctcttctgtcccttctcccttccatttgtgtttcatccttccaggagccttcttgactatccttccagatactccaggcttgcttcacctgtagagctgcacttgccagcccttctgtctactgcatcctcgcaactcaatatgcatggttgacactgccttccttaggcagctggttcttggatcaccctatctaaagaactctctggtgttttctgccatagccctccatgttagtattcccattggcaacatgttatttaatttttatttctattattttaaagtgtccttctctctctccaaaatgggtaaatcttgtttgttgctgtatttcacatgtgtgagactcagaataaactttctagaagtatctatgagtcagagaataaggattatgaggcttaactttgttttaaaatagatgattaaaaaaaaatcagagaagagtgttgagcaaaattgtgtgcttttctgtcatcgattgatatttaaacaagaaatttcccttttttaaaacccagtttgatcattaaagactttccttctttagctttattctgtagagtgaaaattttgtatctagatctgttagagattgggaaagatgaatacccatccgacctcttccaggtccctctgcacaggtgctgccttaacagcatcctgtcagttctatatgatattttgattggacggcacatctgggactcacatatatagagtccttctcctggcccactcatgaaggagggtggggtttctgcttagctgtcactttgtaggttgcagggaaccttcaatataatcccatcccagttcctgggtggatttacttatgggaaaataggtctcacctggagtgatcagtggcagagctgatgtctcagctaccaaggagctttgaccacattggattgcttcagccccacaagtcttctttgtgccctcttccatgctttaagtgagccctgagatgaagatgaagacctctcaaaggcacacaaggaaagttgggagcacagcaccgagctttaagttgagttgctcattcagtaaattccaggaaaggagcgtggcttgcctcaagggaaaaacaccacccaggaccagcacacacagtcttcaggcctttgggccaatgagaacagagtattttcccagagaaatgtatagggccttggggtctgtggactctaggtagtgtgaatatttggcacaatctgtaggagtcttgacgtctctgcccaggttttacttgttgtccctcttcccttattttaaatgaactaattaattaatttaccttgaagtagttccctatcaaaggcataactaacgaacaagaaagagtcgcacaatatagttctactcagccaaaggtctttgctgaaaactgcacagccttaaaggtggggcagattttcttcttggtacagtggagctggaaggctttacagtggcctggatgggaaggacagaggtgggaataggtaatagaaccagagttgcatggtcccaccattgctgcaaggtgctgaatcttatttgtgtggagcatcatttcagcctggggttgggaagaggcagcagggtagcccgagcttgttcaccagatgtttttggagaccccaacccaggctttcaaaccaagacattgtgtggctgaaggatctgtggctttagaagctgtctggatcaggtgtgttctgcgagcctctgttgaatgctgtgctgcagagttgagctgccctggttttatctcagctaatgatgaggagctgtgtgagccggggcatgtctgtcacttagcttccatgtcacttcagttacctttgtcagatgaagaaaataggaagtgtctatatgattagacttagttcagattaaatgaattagttcatcaaggttttagaataaggggtgagaacacatcgtgcgtgacggttagtcgttaatcctgttcatatcatcaaatactgcaattttaatcaatgatgctgagagaagtgaggtgatttctgagttgttacaatctgtagagaaaatgatatcctgtggataaaaatgtagttttcaaggaattcagagtgactcactttggttaattatgctaggacagtgttatatcagtttaaaatattcatcaaaacatccaaatttggagtacccgttgcaattttatgtacccataaatatttggacaaatgatgctaaaagaccgagtggtctgcatccagctctcttaggtctctttgtaagccaatggactttgagtgacttatggcttggctgcttcccaggagtgagtctcatcctccatcccggctccaatgtctttgttcttttctgatttctgctactgactgtgacataatgggaaaggttggtacactctgactatactatgcagtatgtgctctctctctagtttccaaaacaactccttggaattcctttctgtcttccttttctctacaggggactgctttctactcctaatttatactctattggagcacagggtgttcttcagctgttttgtaactaacttctgttcagcagagttagctggttgttgatataaaataatatgtattatgctctttctcattttataatgaaatacttgaggctggataatttacaaaaaacatgaagttggtttagtttatagttccagaggttcaaaaacttggcattgttatcaactcaactttgttcaggcagtcattgtggaagccatgttagcgagagcctgcaagggagagaggtgaggtgtgaaggaagacagacagagcatcaccagttaggggccagaaacaacactcccactaagccccgcctcccaaggtcataccaccttttggcttgtccttcctggggctccatctcccaacacagcaaccactgggggacaaatgacttccaaaccatagtgcctccatcttgctgtatccttccagtgccacaaaacatcaaaggaaacagcaaatgccagaggagcctgagtatggcatatgttatcagccactatggtttgaagctaaataactaagagggtggggcctgcaatttgtcccactgcctgccccgctaaaggcagaccccagcaaaccttgatgagaagactgggacagatgctcactgattctccgaagcttagccctgctaatgcctttgcactcctctctgctctgaatgcagaagccacagcaaggagaacattagttctaggaagtgctgttaattgtacttggagttattctgttttaatttcatacagcaagtagccagtgtgtgagaaatacatgctgctggaaagtgcagagactcattcgtgtgtctaatgaagcttctgaatgcaggcagttattactcagagttttgactgaatgggtaatcatgatgtataaatttgtgtaattgcttaactaagcaagtggctttttgtcacttctagataataaatttattgaaaaagtaaacatcctccctttctcttcctgtctgtcacaccctatcagtttgcaggctttaatattcatgtgcacttgcccttgtttttcattcttccatgaactgggccctgttgttctcctcctggaaggaaggatagagtgatggagggaggggtctttccaatgggaacctgcgctgaagtgccttgctgctatgcacagggagcctgtgcttctgctctgtgcatattcatctcccagggactcatggaatttgtgcttttgtacccactccacacacacacacacacacacacacacacgcatacacacacacacacacaaatattcatagcctgtacttatcttctttctgtttttttccctcctccctgaaggctcagaatgcccagcagctccatgaacgaatacagtcatcaagtatggatgccaagttggaagccctgaaggacttggccagcctctcccgggatgttacctttgctcaggagttcataaacctggatggcatctcactcctcactcagatggtggaaagtggcactgagtaagcatgtttcctcctcgtctccccctctgtctactctagcactgtggtgtctgctaccttctttattctggcaggttccagctttaaagactagactgtgaccagactctgtggaaaagtggcttgaacatatcggcaggtcatggttttgtgattcccgtagctgtatccttcagacaccagttatggggtagagcatgctaagagtccctgcacacctgaattttcataatactggaggtacattaaatacattgcctcaaaaggcctaccccacattaaacctataattctctagactattaatccctcaaactcctttcttatccaagatagcttcatttctctgcctggaataaaaatcagaatgtgatcatatgttttgaggcatttagagcactcttaaaatacttttcaaaaggaatactttaatgattaaaacatgcataattaaaaacttaaagtaatatgtatttattggttatgcagaatggtggcagaattttttcaatgtgagcctcatctttccagaattggtggagattattatacagttagaactgagttagttattaattcctgcagagggcagagggctggaggctgggccgcttacatctcatccttatagaggatgagacattgaacatgagctggaggaagcttgtgttctcatgatggaggggtgtgttagcatttctggtagagaggtttgtctctggtgtaactggaaagactaaggtgcaaggctggtccagcttccaatcatcagttccaatcatcctgatcatcagatgccaatgggaaggaagaggaccagaacgattggccatggtgtcggctgctggtggcacgggcagcacgcgtttggcaagactgattcagttagttacacattagtgcattgataaggatagctttagaggaagaggaggaagagtcactgagaactgggcctaaaggctggttcttgactctccttctattctcaggaatacaaagaacaaatgggccactgtagacattggagacctgtgtggtttctcctccctcctcttcctggctctccgtccttccacactaggtatcattaggcttttgcagttagcattagtgaaagattctttggttttcattcaaagacagtatggttttacaacaacgtgagcctcccccagcctataatgttctctagagtttagaattgggaatcctgtcttggagacgagtaggaaacatttctcagaccaaataaaaaaccaaatcaaacctgagaacattgacaagtgttggtgatctggacaaggccaccgtagacagtagccctgggctgctggtttggtttgtgcgatgactaaactcccctttagacatggtggaccttaaaacagccaggaagaacctgagaatgagtcagaagcaggagatttgatcaggaagagaaagggcctcctctgacagaagtgtcagaggaaatgcaggatggctgtggtcatagctatttttctgttgctgtaagaaaataggctgacagaaaggagaggttgttcagtggttaagagcctatgctgcttttccaggggacccatatcaggctgcccacataaccagctataaatccagttccagggcttctggtacctttttctgggtttttatggcacccatacttacaagtgcacatagcacacacacacacacacacacacacacacacacacacacacacacttaaaaataaaagtaaagtgtgtttttaaaaaagcaatttaagggagaaaaggttcagtttgactcaatttcaaggtgaagtctgtagtccatcatggtgaagttgccatggtgaagtttctcatgatgagggaatgctgctcacattgcatccaccgtcaggaagcttagagtgtgctctgctcgctcactttctccttttcgtacaatccagaatcccagccgtgggaatggtgcccctccatagtggtaggcctttgtacattggaggcgtgttcagagacccatttacaaggtgatcataaagctcttcaagttcgtgttgactataacaggtttaccgtccttttattttggattccagtgcgcagtggagaatcccttttgactgggatgagtgtgtccttaccgtatctcctcaccggatggccactgatcctcctggacacagtgagccttttgaggcttctgtttcagggacatttgctagcctgctagattaagttagaaagctgctactatatttgctgacatgttccagtggtaatatttgcaaggggaatgttctagtggcagaggtgataccaactgctaagagtaagtaggatatctatatctatgtctatagctatctatctatctatctatctatctatctatctatctatctatctatctatctaccacgatatctgggcactttagctttttaatctttacagtttgaatgagttgtgtgcatccatttgaatttacaaggatggcaataataattacaacttgaatagtaacagcccccaagtcaggggtccatgtgttatgtatgtatcacaaatacaaggttgtggctggccactgtatttgagtaatgaagcctgcatatccagaccctctccattttactgtcccatagctaagagttccataacacaattccagagactggttaagcaacaaaaatgctcctcctccccctttctgaaggctggaaggtgttactatggtttgtttcttctgaggtctatctttaccatacagatggctgccttctccctgtgttctcatgtgccttctccatatgcctatacatcctagtatctcctcgtattcagacatggtcctctcagagacacctgccagattggattagatcccatctgaatgcccttattctgaagtaatcagcctttgcaagatcctgtctccagttgaagctccatcctaaagtcccggaggttgcagcttctacataggaattttggggaggtcatagttcagcctgtaacactcatcaaaggaccgctaccacttttctttgtcaagaaaagaacgtccataccttgctaagattctcacgtctcacctatcctactgcctgcctccacggattgtcatagcctgctgttgtattcagagtaacccctatgcctagctccagattgtcaaaggcaggtcttagtcatatcatggcgctcatttacactgagagaggatattaacaccagatgttccttgtgaacaaagaatacattttatacgtgagcagtacatctcaggtcttatttttattttcaaaagaacactaattaacatagcaatccctgtattcagccattgcaacttgacatgtcctgtcaagtttcagacagtttaagcagcaggagacccgatcttggatgccttctcttttgcatttttcttccacattcccatcatgccactttcctggaaagagaggacatctcttgggatttctctgtgttcccttactgttttgcatagaatcaaagccatgctgtttttgaagactaaggaaataggcatgcaaccccaaggcctctttctcccctttgccaatcccacatctcaggtgatttatttgatccccaggcagttttctgatcttttactcaaattaaaaggaaaagaaaaagccattttttcttaaaagtaaagtgaattcttggttggacattgagcaatattttaattaataaccaggaaactttggagtagaaatctctgcagctggaaagccgttctgtcatgccttcctaggcagagagcctgctgggaaggtggatgtttccctagcggggcttgtggaaaatcttaagaagtactgaagaaagagcactgaaaaatttctccttacttgtagtaatgatgccattcagacagtttgagctacttgcccttacccagggcttccttaaagtccctccgcagctgttgccaggagaggctcggggtgaaatacataacaaagcgaagcacagtgccactttggcagagagcaggactgcgagcctggaatggatgtttccatccttgtggagtgttgaaattttacccctgcattctaactgaagcaggtatggaaacaaatatggttgtggggaaaacacattgcctaacacaagcaaggggaaggatgttagtgaatggtggagaacaaaagatgactattcggacactgcaaataatatctctgacttgattccagaaaaggaaaatatgtgtcattcagtcaagtctcacacacacacacacacacacacacaacactgtgcagatcactcatcacccctccctattcagtggccagtcattgctggggacagacaacagaagacttttccaagaacggagggcagaacacttacagtttccttcctacttggcagtttgagggaccatgagagcataggcatgtgagcaagccagaacaccgccccggacagcccagccaagaccaaagaaagcaattcctctgcttctcaagaacccagtctttatagattaactcattgcttatgaaatcatatttattgttagatataaaaaaaaagtatggaaggaaaaaaataagaatgcttacaagcaaacatgtttgtcatcttcacatatcaccctgttattttaaatatacatatgcatacggtttctatgtttttctttattgtaattttccacatatgtttttactttatagaagatagttgaaatgtagttcatatgcagataatacactaaatcaaaggatacctgtagtggttaattatccctgtactgtaagggattttcatcattttctggttattttgtgatctttttctgattacttctttgaacttacaactgtgactatttaaataccatataggaagtagagagatagtttagaagaaatgagcttcattttgcagaggaccctggttcagttcccagcacccacatcaggtagctcacacctgcttgtgtctcgagttttggggattcagaagttcgctggactctgagtatctgcaaacatgtagtgcacataaactcaagcacacatcacacacacacacacacacacacacacacacacacatctttagatggttttgttagaataagaggacataggaattttaaactgttttccagtaagaagaattcagcagcttgtgggatgccctgatactttatggttcctttgaacacatctgtgccattgctgagctggtaatccatatactttctagtgttcctaggaatagtgatatattccaggggctctctctaaactgtgaaattaataattctcgactaacttgttgggctgagattatttttcataaatttagcttttttaaataaaaggatgtttttataatcatttagtgatatggaaagcccttgtgtattatctttaaaatatcatgtatccaatcatcccatcctttgccaggtgctgtgtgcatatgtgttgtgtagaagttgctactgtagtgtcagagtaaacctcattgctcaaatggttttcgcttccctgaactggagctgctgcctcttctgagtactgtgagattgtggtggaaatgactgtgcacggtgactgatggctctgtggctttggagttgttgacgcgcacactgaggaagcatttgtagaccccattcctttagtcaagtatgtgctctttgagtgttgcacagaactcctgacacagaggtgtgtgtgtgtgtgtgtgtgtgtgtgtgtgtgagagagagagagagagagagagagagagagagaggagagagaggacagagacagacagacagagggggggctaaattctatattccagtgtggacgcagtttcatgatgtttcagagtaacagaacagaaaatcaaaaatcaaaatacgttggtgaaatcatcagagaggcaggttaccctaaagttggagagcctattagaggcctctgaggctgtctgatgccactcttagctttggggttggtagagactagtagcctgctagtttaatatatttgaaatggtttcatcagacagtcacaggatattaggtcagacacaaagtgggaggagaactgttaacaatggggctaaccagtacgctagtcttgcaactgctttaggagaggcatacgtccaggaacttcctagaatattcaccaatagggctggctcaatagtaatcttgttaaagatactcttccgagagaggtagcgttgtgactctcatgtaaatatagacatgaccatgtgttaaaagaatttactttacccatagaatatgagggaaccagacaggctgaaatattttcaaagaaaagtcaaaaaggcccagatttatagagagcaagggaatgctgagaggaattgcaaatggatacaaaatggttttccacaagcctgaggaagccaattaaatcactaccagacaggacaatagcatcatttgttatctataggatacagagctgtaaaatgactccaggtcagcctgggagagcctgatactgcagaaggctatgctgcccacatttgcacagttgtccttggaaacctgggtgttttcctccagccttatctactttttcctcaagatcagacccatagcctctccctcatcataaatacctgttaggccctttaaagtttggtcctcttgaggccacaggatgtctctttgttgcatttggccacttaattaggtctaggtatctttattgccacatttctttaaaattttaattgcattttttgaaaacaactatgaaatcatgcaaaatggaacctgtcaccccagtttcactccagatctgacgttcttttctgagtggcttgtgtcagtgatggttcccacccgagtgctctgcagcagtactgtctctcatggtgtagttagtgccttccgtctgtagcacagactctccggtctagtgttcgcttgttttatcctttgttaatgagatgtttgcctagctccttgtcatttctgtataactgttctagatgtgagctcaaggatgtcatgttggtattttaaattggccgtgcttagcacagtgacacaacaaaggttcataaatcaggtttctatgactaccccagagtttctgtccttaaagtttatggccacatcaccctttacagccaagcagatcctttatttctgtttgttcagtacattgtcctctgccactagtattatttattgcgtggtcctcttctttaggcttgacccgtggtggctctgcagtttctgtgtccttctgtctgtctcccattattttcagaacgttgttttcttttttgtctctctacaatgtaccttttatttaaaccttagtcctgacatgagacattttccaaagaagtgctatttccctgtggttccattgggttctgaaaatgtccctagcatatgtctgctcatgccagtcttccctacttctttgattctgccaatgactttttggtaaaggaaggaagtaaaataataaatattattttaagtaaaggaaggggaaatggaagggaagaggaaacacttacttttctgttttattaattacatagagttcaaccttcatgtggctttttgggttcctggaagaattgccagcagtgtgggaacagacataggtcgatagtgtcaccctcagcagcctgtaaccttatctttagatcattgacacgagccaaaaccaggtgctttgctttgacatctgtagtaatgaaccagatattcaggatttgaacttgctgaaacaatgacgcagagttggagactttgttcaatacattttacttcaagtctcagcttgacaagtgagaaagaggttatcgtggaaaacgtaagctacgcctaagagtttgggccatgcttttctaagaggataagacacactcaagagtgggtatgagttagtcaaaggagtcatagaagtaagacatatgcaattgtgtaggtatcggcatctctggggaaagtcacagagtaagatgtgacagatacacaccagtgtaggtatgggccccccaagaagattcctgattcatcatcttagtattaggcatgcataccattttgctaagaatccattttcctctttcctctccttttataactgagataagtgagcatgctttggagactcctaacctggagttagggtctggtagggagattcggccaggagcttctgtgctttcacaggcatttaccacatgctcctccttgcaaacggactcctagtgagattcctagaaaattgacccttatatctaggaaggaaaaatgctaaagcagttgttaacgtgtgggattcttctttattggcaagagacttcaaccagatccctaggtgaggggcctattcccttctcatgtaccctcaacttttccgatcattttttcttgactcggggttacatttcgacatagattgtaatttctcttgaagagtgaaatcattcagcaaccactcaagtacataagtgcgtgcatttgaacttccgtccctttctcctcatgcaaagccctgctcttcaaaggactgaaaggcagtgagcttagacatggaatggcctttgtcactgaagatgaggaaagaaaatcaggtgcaaggcagtctcctataagtatcctaaaagtcagatgatgggggggggggatatgtgagaaataagataataacaacttcaaaagactagtgaaaacaaaacctttttcttttaatcacaccagggtctttattcacaagctctagcttggggcttcaccaccgagttgaatctgaatatacctgtgggagttccctttcatgtaacatccctttcaggaaaccagagagattgtccctatggatcttataagaccacaaaatacataccactttttttgttgagcaacgtgaaaaaagtggtttgaaagtttttaaaacaaaacattctttaaaagatttattttatgcgtacgagttcactgtagctgtcttcagacacaccagaagagggcatcagatcccattataatggttgtgagccaccacatgcttgctgggaattgaactcaggacctctgaaagagctcttatctactaagccatctctccagcccgacaaacattttaaatataccatttttgtagaaagtgacactggttcagagaaaaaaattaaagtggccggtgggcttatctggcacaaaagagtgtattctaaagctactcattcatgagcaattcctgtcttttcccataggaagatttttttccccatctcaaatgacttaagacacaaatgacttaagacactcattggcttaagacacaaaaccgaatccaaaaaaaaaaaaaaaaaatcggagcttgggacttcttcctttttttctagtggtgtgctcagtcacatagcagatgatctggaattttccaagtctcagagttctgagagaagcgtgtgccagctttagctggaggagagaggtgcccaatgccttctgctcgtccataactgatgaactccaagcacaccttatactgaaaggaggccatccctgtctgtttcttagagatgtgaccagctctagggagggatagaccctagatagtcagtgaccttagagatgggatggcctggtccactactgtggtctagcacaccacaggaagatttaaagcttgatggatctggccgacttgaggaatggaaggtgccttgagagaattagagtcttttaagtctttacctgtgtcttcttgagcctaggaagtttctgttgctccccaaattcctttttctcagtttagtaatcctaacacttgaggctggaggatgattgcaaaaaataaaaaaaaacaaaaaacaaaaaacaaaaaaaccttaaagagtcttaaacgagtgagcataaaacattttaaaatagttgaaatgtcaggtttgtctgtggcaagctccatcctcaacctcactcctagcttcctgactatattggttcctacactggctctcaagagatgaagacattgtaatcagtgtagactttactgaagaaagaaactaagttacttctagtctagtccttctgccacagcttaacccattgcaaagtcacccatacttgcttcatggggtttctttctccattgaacatggccatcttgtttctgactgttaccgttgttatagtcaaatgattactgtggcttatgtgtttcgatggataagtgtttctactgaactgtgtctaatcctgatttttttctagataggtttattacataaaaatcacggttttgaagctcatatggtgttcttacttttgcagacgataccagaagttgcagaagattatgaagccctggtaaggatatatctcctgatgtgatttcataattccttactgtgcctacctaattaaatcctgacctctcatttcataattatgcatctagatattttgagtgtttctccgctttgtttgatgttcttttaaaacaatttaagataatttaaaaaaatttccttttgctacttactgtggcagaaagggtattttatgattgttatctctaagtgatcaaagctgaattgctcccttccttgagcaatgatagatgtaattttatgcattacttcaaataagatgttctcctttgtggcccatgtgttgttgaacgttagggtctttgactttcttctgtgactcagaaagcaaaagattcatattcaaacaaaaaaaaaaccaaaacaaaacaggatttgtacatagaatgaaaattatttaagtctgaaaaagaaagttttcttgctcatctcctgcatattaagtccatgatagtcgtgtctggagatgttagaagttatctttttaaaaagatgttttccttactattgagaatttactagtgtattaaaatatgatcatttgcatatctgatcacctaccaacttctgctctgtgccctgacacaaccacttcccagtttgtttcatgcttgcttctatgtttgtatgttttgatagccactaagccaaatgacctgtgttcatacatacagagagggtcatccactggagcatgaagaacctcccagtggtcacactcttgaaatagaataattttcccttcagtgagattggtttgtttgcttctgtttggagcaggatacctgctggtcccagtataagaggcaccagtgaggctcagtgttaccctgttatcagtttggagcttacagacagctagaatattaacgagaatccatggagttggaggaagctcaaattatgcaagatgccacaccttatgacttgtttaggaatccatcacatactactgcaatgtaaatgtgtgtgtgtgtgtgtgaacctccaggaagcctggctaaataaaagcaggtcctgactgaaagctggaaggattgttcagagttgtgagctgtcagtcactgcagagtgtaggtgagctaacctactagaacaaaagtctgaactatgaagcttgataatcttattcagtgtctatcacacaattctctctatctctatctatctatctatctatctatctatctatctatctatctatctatctatctagatagagtcattaagactatgtacatagttaagagagggagaaaaaatacttagtaaaaaaatcaaaccaaagatgaccagatattaaaattgacagataaaaattcttgaacttttgaagacaacagtagtaatagtagtagtagtagttcctgttgttgttgttgttggtggtggtggtggtcatgggtcaggtatttttttgtatatgatagagacaagtgggtaaaagaggctaatggaaatgtgaatatgaacagaagtaaaatgaaaggcagtaggaaaatgtcataaagaaagttgttagctaagcggaaattagtaatagtaaagatatgcttaaagtattagtatagtgaatgaacttttgggaagtctttacagagatatagataacatgcaacacatatcacttataagactaaaaaagtggagacgagagagatgactccatggttaagagcattggctgcttttctagaggacctgggtttagtttccagcacccaaatggcaggtcacagctgtttgtattccagttgcatggtacctactgccctctcctggccttcatgatcactacatgcaactggtgcacagatctccatgtaggtgtaaagaaaaccctcaaaaagtttaaagtggcttagaagaaaagaaaggaaaaaaacttcaaagtctaaaaagtacaatagttaaaatgataaagtaactttatgtaattgaaggtagcagtgtgacctagcattgaaatctgtaattattcagtctaaaaatagaaaactgaatactaaatactttacctatgaggtaaaaaatgtgacttaaaatatttagcacctcaaaagtactctcaaaaggagagaaacatgtatgggacagaaaagtatttgtaaatcattacaggaaaaaaataaaatgcatagagatatataaattcacagaattaagaaacttatgaaacccatgaaagatgaatacaaaggaaattatacctgggaatataaaagctttgaaatccatgttaaaattaaaacctttagggcagtcagggaaagagaacttactacattccaggcataaaattaagactgaagactgagttctcactagaactaatgaagaccagaagacatcatgtgaagaagaagagggaggaggagggtgaaaaggaggaggaggaagagaaggaagaggaggagaaggagaaggaagaagaaggaggaggaggaggaagggagggagggagggaggaaggaaggaaggaaggaaggaaggaaggaaggaaggaaggaaggaagaaactgtgaacaccagaattttgtatttgatataaaactctccctggaagtgaaggtgaactaatactcttttagtttccagaggggagagattaaccagaatgcattatatggaattnnnnnnnnnnnnnnnnnnnnnnnnnnnnnnnnnnnnnnnnnnnnnnnnnnnnnnnnnnnnnnnnnnnnnnnnnnnnnnnnnnnnnnnnnnnnnnnnnnnnnnnnnnnnnnnctaactaaaaagacaacttattgctagcattatatgagataaaaagcaagctcttcaaatggaagagacctaccagcagataaaaattgggctttatctgaaagtatgaacaagggaaactgtcaagtgtataactgtatgaagataaactgtacttttttatttgaagacatgtaactgtatacaaagaaattaaaattccattttattatagggtttatgtcttatgtagatttaaaatatataacagtagaagtgcaacaggtgaagacattaaaaagatagtctaaaaagcatcctactgtgtaatgttcactttgtaaaattataaaagttgtatagctcaaaatccagtagaaatattaaactgagctgcaaaacaaaaaatatttcattaattcaaaagcaacatacgacatatctgggacagatagaaaccaactgtttattgatattttaaacttaacaatacagtaaatgtaaatggactatacactttatttaaaaggctgggattgtgagagcaaataatgcaggatgaccccacatacagactgtgtataaaatattagaggggaccaaacagatttgaaagttaaaatggaaaaatacatatcttacacatgctactagtaatatgagtggttttattaatatcgagagatataagactgaaaggtgatatgttgtcaggaaaaatgttctaaataatattaaaaataagccattaggactcaataaatatgtatgaatctaacataagctgcaaaaatgcacgaagcaaagctactagaagcaaataaactcatcctgttagttgaggatttaaagaccctgtctcataatgagtaggaaacttggtaaactcagtaagataaagatgctgtaattgacattagtgtatattgtttatggagcgtcatccttactgagaggagaatatagatctcagtatatgtgaaatattcgtcaaggtggatcagatgcagatcatcatgtatctcaagaagttgaaattagcttgaattatgcagattatgcttttcatcccaaggacatttacaagaaatcattaataaatagctgaaaatatgcaggtgcctggaaattagaaattagaaatcatgcttatttttctaagagttgaggaacaatgacttggttgaaaatacaaaatgtgtgttcaggtaaaggcagtgtttacagtggattgtatactcttaaatgcttatgctgaaaaaaagctaaaaataaaaggaacgacacagaattggaagattaaatgggaaggagtgggaaggcaggggaggggagggaatatgagtgggaactactaacactaaaggccttggaaacgcctcatggaaaccaactcctgtagaagcttcctgggacaaatacatacacgaaaggaatttgaccagagtcaccatataatgggcttagggatgggataatgacctagctagactccttatgccaccaaataaaacctccagtgacagcaatgggttacaacttgttgagttgttggccaggcccaaagggtcccatagacaattccaagcttcacaggctattgccaagggtactggtcattctctgtaacctagtaggtaaggtcttattgccgaaggcaacacgttttgtgtcatcaagtatggagaaattgaactgatgcccagcctaaggttcacccctaccagctagcattcctgtatgctactggatgagaaaagcaataatacagctcaaacccctaaaacctcaaactggttttaacctgtgcttcgcttgtgcttgctctcacagtggctgagtccgtatgtgtatcaggtctgttagatatactggtgaagtggtggcacaaatgttatagagtaatacactactttttttaaaaaattggatttaagaaatactccctgagatggaacccatacctgacactgctactgtggccaagaatctgagaccagataggtcagggacataggagaaaacttacgattctgccaagggagcatagcaataaaatgatttctaatgacaagttgctttacccatcagtacgcgccttggttaaccctcacgagagaagtttgttcttacagttaatggggattaatacagcaacacacaagtagacaatgagcagagaatgagactttacagcactcagtcttaaatgagatgtctttatcaaacccctcccttcaaggctcaggggtctgtgcagaagaagaggtggaagaggcagaggtggtagatgattctaaggaaacggcatcttttcagatcccacagggctgatacttatataaacttacagggactgtgacagtgcgaacagaaagcacagtttcaaatcagacagaattaagtaactatttacaacacaaagaagctatttacaattgaattgataactgctggaaaaatgaaaatcagttctctagtggagtgtaactgagtctgttaaacaaattgcaacacaagcaggccccgttcccagtgctttgtgcccaggagtagtgggccaacagaaaatggacactatatagttgaggggtgggggtgggagttgggagacgcggggatggcatttgtcttacattgttgtttgtttgtatttccaatttttggttttgtttgttttttgagtcagagaaataaccagacattggtatgtgtgaaggtgaggaagacatgggaggaattgaaggaggggaaagaataggatcaaaatattttgaatgaaacaaattttaaataaaaagaaagaaatcagggatataattttatactcaggggagtaggagaacagcaatcaatgaaagatgaaaaagacaaagaataaagaaattttagggaaatgaaattatttggagaccttctggagagtgaaaaaaaggtcgttacggagatgagaagtgagctccagaagcagcagagagtggatcgctgcagagcctgctgatttgaaaagcaacatgagcaaatgtttctctgctggtaaattttaaattttagattaaatgcacaaaagtccttatgaaatagaaatcacggtgtgtatctgcaatggaaacacgtggtttgatcccctttccagaataccttgctgctcggtcacaggagagtcgtttctgaacagttttcagctatagggcattctaaatgtatgccagctttaaaccatggctgtcatctcccagcagcctctttctgcccattatggactcttcctggagccatggattgttgtaaaatttattattcaccactttaaagttgctttaaagttttctagaagtttctcaagttgactgttaggtcttcatcaacttcctctctcgatatctaatctacagtatgttctgcaaactccatgccttcggcttcaccgttttctttttcttcttttttaatttcgtacaagtatctacatgtgtatggaggtgtgcatacacagagtggtgtgtgtgtgtgtttctgtatgtgtgtgtacgtgtgcttgtggaagccagatggaaatgttgaatgccatccatgaaaacaaaatctcccacaggcctgaagttcaccaactaggctggacttactggtgagtgacccccagggacactcctgtctctgctttccttagctcaggagttttaccttccacccatcatactgagcattttatgcatgtacaggggtgaggtgtatcgaacccaacttctttccctcaaaagataggcattttgctgaccaagtcaccgaaggcccaggctaaggccttttgtcttacacagtcgttatctagttttccaacaaacccctccatctcctaactctatctcaacttctgcttcttagagaaataaaacctatatgttaaaactgactcttagtgaataattactgggagcattcatgttttctcaggagttaagatcactataaaaaaaaaccttggtggtgtgaaaactgattacatgggtaaaatccattatacattgtggaagaattaccaaatatataacaaaggaggagaaacagtttatagcactttcatgtggcctgcatcattcgatatctcaatctgattatgacaattcaggaattaaatattatggacaagtttaccagtgaacagaggtacagaagaccccagcaagatattaacatagagccaagaaatacataaagcaataacatttcctgacttgtgccagctctaagtcaaggctgtttactccacagcaacaaagtctaatacattggctagtgtgatttataacagaaacagcttaacatctgaaaatcaatcaatgttaggcatttaataaaacacatcagataaaattattttataagaaaaagaccataaaactcaagagatagctcagctgttaagagcacagactgctctttcagagtcctgaattcaattcctagcaaccacatggtggctcacaaccatctgtaatgggacctgatgccctcttctggtgtgtctgaagacagtgacagtgtactcatatacataaaataaataattaaattttttttccagcagaacagcctgatgaagacccatatatatctatatatctatatatctatatctatacacacacacacacacaatagtatatatgtatattattggtgggaaacctaatgtgttctatctttaagattatcaaaaagacacatgttttattctgtactttttgggggctgagttatgtatgagcttttgccatttgtgagaagtcaagaaagaagttaaaaggcccaatatcagaaagacataaaactatctctatgcatagaaggctcaattatgtagaaaatcctaacaaagctgccgagagcctggcagatgtgataacatacctaccaacatcttgagatagaatatccctacataaaattctgtgtactttcattttcacagcaaacaaaaagaaatgacattacatttccccatttataaagtgtcaaaaggagaaaattcttttgaataaattcaacttgaatttgcagttatctgttcatggaacaataaaaattactaagccagtttaaagatctaaatcagtgggaacagaccattttatggattgataaacaatattaaaaataactgcttctctgcaaatctcagtttaatagtatgcaaatcactggaaaaaattaataggacttgtgagatggttcactggctaacggcacttttcctgcgctcagttcctgggattttcatggtgaacagagagaactgacgttaagttgtccttagatctacacatgtgtgcaatattgtgcacacacatgggtacacacatacacaggtacatacacacacagtcatacacacaggtacacacacacacacacacacacacacacacacacaccaccatcatcatcatccccaccaaaactacatatacaatacataaaagtaaaaattaaaaaaatgagaactttctaaaatttaggtgaaaatacatattgcataaatagctaagaagaaaatctgagaggtctattaggtgcctgtaagctctgctgtaggacaggttatcacaacagcatgatactgacctaagagagaggcgggttgattcatagaaatataaccaagtccagtgtcaggaaagcagtcgtgattatgcctactaatatgggcccagcaggttctggaggatagaaagtagagtgtctaattggggatttagttatctacagcctccaatggaggcaaatgttacccacggttgatggacataggaagcctgaacaggggaggaactgtagcctttagtaagggtctgtttgctactgttcatgaatggctttaaaagttgtctttatgtttattattccgctgctggttgtgtcttgggcacaccgtgctatggaaagatttgcaaggactgtgcttttacaaaactactagcttacgtttacatgcttgtttttagactggctgggttttccttggaatgagggctcatcctcacgttgatgagaaacatttacttgagtcagtccagcacacatggtgtgtcagctgggagaatggaagtcgaccagtgcagcaggcagtactgcagactccttagcacagcacttcattaaaaaacaaggaaagcgtcccagaatgtgcctcgtggttcctttacatttgtaattctttaaaggcttccccctccactctgcattgatttcaaaagtagaatctgagcctttgtctttcctctgtggtgtttgagtcagtcctgcaggagtggaagtaaatattgacagctgagttcgagaaaagctgctagctccacctcactggaaagaagtcttttgatttaaaatagaataaaaatttaccatgccgtctttaccttacatctgaggttttaaagttgaattgtgaaaaaagttttcatggaagcacactatgccacttagcagttagccacaaggagttatatttactctgtggaatatatatatatacatataccataatgtgtattccgtgtatgtatgctatatattgtaccatagtacaatactatttaacaattaatatgttaggaggagatcatattatatgattctttctatcaacctgtcaatcatctagctattgtgttagtgaaagggccaattctgaccagagagcatcatcttgatagtcaggttgtgtgacacagcctttcttttccttggcagtcattattgttgatggtgtctgagtattacagagcttgcaatgtgcaacctgggaatttctgctcttgttcctcaatagctatccagattaaagccttagacagctcatttggaggttcagaaacccgcatagttctctccatttgtctcctttcccaggtccttgaagcctgtcggggatctgtagacagatctttgaaacagaatgattgtctcccttaggccatttggattgagatttcactgcgcaggtagctgaggcgctgaatcatgttgcctttagatccctttagaaggagtgtatatgatttatttaccatttttcaagactaatggagacggatgtggagcctaaggccttgggtgctccggggctcaggtagctggctgggaaggaagaattgagccatcaggggatgctttctttggcattgttggttctctgatcaccaaggcaggtatgtctgtgctgagtgcaggctgtggtgacatcattctacttctccgtggggcatggcagacccttcatagacactgtgacagcctcaaagaaccatgaccccctaaaggtctgtgaacctttatcatatcaggtatacacaaatgccaaagatcgttttattcttttatgtaaataaacaaaattgccataatacttctgaataatacgtttattgtattattgtatgcctgtataatgatattctcacagcaaaacagaaacctacccagttgagttataaatcttactaattgaatgtgctacctgtctctattttctgaggcattttctcctgtaggggttgataatgggctttttgtgagtctctttttgtagggttgctcttgcagttttatttaaacttccttggttttaatttttttaacctattttctactcttcctaagtttttgctttttccaataattcttcatattctgcacttccttccgagatacactcgatcctctgatgccacctagggggcacctgcaagattaggatctccgtgttttccctgcttctatgaacagagcaccttttccacagtgggctgtggaatgttttaaacccttagcatcatttgcttttcaaaatcctaactttgtggtggtttagccaacctctccctgctgcttacttttcttctccattgctgtttgaagggctggaggcatgtcagctggcttgcttttcctaaataacccccagggtaggaccattgtcaccaccactggcttcctcttccctagcttttgaaagctgggagggacagtcaagtaatttgctctgttgagcgggaggccaaccctttgctctgtgacttgcgatctcctaattgtttcttttgagcgcctctctttccctctggtctctgagttactgtcctctttgatgggctcctttcagcatgatgaccgccaaaatgaaagttgatttttaaagctggactgagcagaccagcagcagggagggctgtggaggagactctgttcatgacttctttttcactgtattagttgataacagagaacttcaacctaaatttgttttgagacttagaaatggagaaataatgtgatgtgttattctgaacaaccaagtaaaaactgagtatggacgtatgcattattgtataatgtagtataggagttctgactggcattctgggatccttgctttggtgaggtcattcatcatggcaggaatatgaagttgagcacaaaccccttcccatgctcgaaacaggatgaggctagggcctcgctgccctcttcaggagcagtgatgtaaagacagctcattgagccccatctagttctccatagggctaaggtgggtaaagtattaaacccacagacttctgggatgtgctgaccctaaccacagcacaatcgaattcgtgtttgaaggagccagtgctgagccagcaagcccgttctgtagtcattatctccatagatgtgcgggtctctgtgttcaccatggctagcagagtaatgatctgtgggaggcaagaaggtagttcagctcaacatgattcagtggctagtgttgcttcaaactttaagagtctaaccccaaatagtttactttaggcatgtttaagtctagcgtaacttggtgaaaaattttccgataataactcaatctgtgcgcaccataaagcttaaggaatgagtacatcagaactctctgtaatgtataggtgacataatacataaagttgggttctataggttgactacatgtgacatcttccattaagatgggttctataggctgagaagctcatgataagggcccagggcttcccctagcacttaatctgggaacacaagaacctctgtgcctcccacacatagacattacttaaaatacaataactaaatataaaatcctaactcatgtaaaacaagtgatctacttacatacctatttgcacgtgtgtatacatatagtgtatatgaattccttttgtgatatcttttgacttgtgtgtatatgtgtgtatatgttcatgtaggtacaagagcatatggaggccacaaaagggctttgaaacccttgtagctgaagttaaactatcggtggttgtaagccacctaacatgggtgctgggaagtgaactgtggtcctcttcaaggacaacaggaacacttcacgactgaaccatcttttcagtgcctttgagtcctgtgttaagggctggtgttatggggagcccaccagagatgatcactcaaccacgtttcttagccaactgaaagacttgattccggctggctgggatacacagggatttagatcaccacgaaaccctcagcgtttagatcaaggggattttaaaggggaaaagcgcatcctgttatcgtcctcagcagctgaaggggaagtttgtacaagcaagcagcttaacagaaagaagctaagctaagttggctggggccttttggtctcaggtcctagaacagagttggattattttccacgggattctaaatcaaggagatcaaattctgggtaaacatgaaattgtttgtcacattcttaatgctataggtttgagtttttcttcttgattcctataggccataaagttcctctcttatttatctgccatttgctgagaagttggttaagctaacattaccaaaagcaattattcttttacactttttaaagtactctctgtgcagccttttgctatacaacaattatccagctactcggtggaggaaacagagttgcagaggggtgaagtgaaatgcctggtgggacataggcctccaaagtgtgtcccatgagagaaaaacctgttgagtctctggctctacttggtgatttcgagttcctgccctgtcccctaatttgtatgtgaatactgtcctcttagtgtcctgcttcttacccctatggtctttgaaaacttgactctccttctcacttctacatttttcctggtgccaagctgtggggtctgtgatgatgatgatgcctcttgttttacagctttggagacatgctgtccttcactctcacagcctttgtggagttgatggaccacggcattgtatcatgggatacattctcagtggctttcattaagaaggtaaggcagtgcttccctagtctctccccctttctcttttcacatagagttctctgcattgtaggcattttataattgttcttttagttcttatgttgaaagtggtgtgattttggtagtattatatatgtggggaaacaaaacccccaaatgctgtgtaaaaattgcattttgtcccaacagatatcataaatggtagcgtgtaagaacccagagttaaagagcaatcaaagtgttctgcttcaatttgtaatatctatagatcttaagacctaacaaggcagagagagagctaactgggaatggtgttggcttttgaagtctccatgttcagtttcagtgatacattcctaatcctttctaaacagttcatcactggcagaagtgggaggactaagcaagcagatatgtagtctttgggcaccattttcatacaaagcaccaccattaagagataagttgtgtgttttccatttgacattcatcttggggaacaattttaaattaaagataggagagagacagtctctggaccaagggtgttggcaatcgaagccccacaggtcccatgtctgcaggatgtggtatgtttatttaaggtaagagctaattggaagctaagggacttcttggtatacttctaaatctttctttttctacatctacaaattcagaggtagaggtaagtaaaagcgaatcatactgttggctaaattgctcagaagaaaactcttagatgatcaagtcaaagatactgatgtgctacaaagatcattcacctggtggcgggggtatgtcttcactttctggaaaaagttctagagagataaatccacacatgaatgatactgggttaagtggaattttatactaaaaagtttaatactttctgaatttgcagcaggtttttctttcatgtcctgttcatcatgtgtcagagaccttcttgctggatagtgataatgctgttctgcataggaggttttgagaattatgtatgttcactggcattagctttctgggtttattgtagtttcctcctccttctcctcctgtgtgcatgtgtgaatgcacacagtcacatgcacacacagatacacacacacacacacacacacacacacacacacacacacagatacacacagagacacatacataactaaacctagcttatgtcagcagggtcatactctcttcagtggcatggggccactatcttgtactgagctgtcctccttgacctacccataacagttcagggattcttgcttccatctgaggcacacccatagcctgagattttaaaaaaaagaaaatcatataagttgaaaaatagaaggagcatggtgaaatttgatttaaatatatttccaaggaaatgctcattgtcatgagaaagtaataataaaactttgttttttaaaatgatttgagttaagtgctcagagacgattcaggtttttaactagttaagatgattccaattcactttaaattaaatttaaaacccgcattaaggctaaggaagcaaaagctaattgcccttgcaatttaaatcaaaattgaaatatttttcaaggcagcatcctagtacattctttttctaatttctattgcattgctacttagataagagagtttgaaaaaaaagcagaaaattgattatgctgtgtaagttgacccttcttatccattagctagaccaaattcagcattctgagcagctggatttgtgtgtggggcatcttcagcaaaactccggtagaaaatccacaaagccaagtaaaataccagtgcagtgctttgtctgacagggaaaggcaaaacaacaggctctgaggacctggcttactctgcagatagtttgcattcagaacaaacattcaggcatttctcttcattgaaccagtgagtttcgccttttggagagatttatgagcatctacaagggtaatttaaaatttcatagtgcagctttatcttatctatagatggcccttttttgccttttttaatgtttcatttattttgaaattaattaattaattaattcacttgacaacacaatatcagccctttctctcctcccagtaccccctcatgcaagtccttcccatatcccacctttgggggtcaccctttattactcctccctctgcacatcaagtcactaggagacagggtgtatcctctcccactgaggccagacaaggctatccaggggcacccagcccataggcaggcaggatcagggacaacccctgctccagttgttgggaaactcatgacgcccaagctgctcatccactacatattttaggtggcctgggtggtctttggttggtggttcagtttctgggagaccccaagagtccaggttagttgacattgtcggtttttctgtgggttctctgtcctcttctgttgtctcaatctttttctctgctcctaaaacatccttcagatgttttggtgtgggtctctgcatctctttccattggctgctgaatggagcctctcagaggacagttatgctaggttcctgtatcttcaggctctatggatgaccttttaaagtttagatagtgttcaagaaattggagacctgaacagtatttttgctttccttgttttacgtactgctgatgccacttatattctgtatttgtggttgggtcggggggtgagggcatgtgtggggtgtgtatgcatgtgggttgtgagggaagtcagaggtcatctttgagtgttgttcctctggagacatccatcttggtttctttagaatggatgtcttactgggacccaaagcctgccagttaggttaggccagcaagcctcagggatccacctgtttctgtctccccggtgatagaatcacaggcacacaccactacacttggagttttgttttgtttttttgattcatgtatgtgagtacactgttgctgtcttcagacacaccagaagagggcattggatcccattacagatgactgtgagccaccatgtggttgcatggaattgaactcaggacctctggaagagcattcagtgctcctaacggctgaaccatccttctagcccaacacttggttttaaacatgggtgctggggatcaaacacaggacctcatgcttgcgaggcaagcactttaccagctgagctgtgctgcagccctgcccttagcttcttaaaagttccccaaacattgcccctacttaccgatgaacatgagtgcgtgtcctgaagaagtcaaatgcattgttattactcattgctccagtgtctgtctctcggatacagacttgctttcaccagtctgtgctgttctgacctcagctggctcagtgatatggcgaggagaagctgaaaggtacagaaaaagcactgttaatgttgtgtatggggtggtgcagcattgtaaaatttacctaggtaacctgtaatctcccgccactatactctcttctatagtttacaatgtggtcaccaggatgtttgtagcttcactattaaggagtttgtctctaggttcctggaggaagacagttagtacatatgcttaaatcacttctgatggaaagaatcggaccatttaagtgtctggttacaattgatggataacaacaggggaagatgtcaggttcaaagcccaactggtgcttgccttaggactgtgtgaggactcaagcaaactggacacatactttacaccaggcctgttcccagctcccaactgggtttatgtaagatgctcattaggtgaaatactttagggctgcagaaatgactgatattctttgttaaaggaggaatgaaggtgaacaattagtttcatggatgagacatacaaagacatggcaactagaaatgaagtatgggtgaagatgctaatgttcttaaatgaaagcaaagatcattggtgattttaccaccactcagtatcccactgggtgtaggagaaaattaatattttccaaagaacttaaaatctttttaaagaaggtgtcctttatcttggaaaacattcaagagtactaaatgaatatttggggggagtaattgttgttaaaggatatttgtagaagtaagtggtaaatttccatttaatgagaaacttgacaggggatagagagacggctgagcaattaagagactggatgctcttctaaaggaccagggttcaattcccagtaaccacactgctgcttacaaccatccataaccgtagttccaggggatctgacaccttctctggcctctgtgtgcaccaggtacacaagagagagagagagagagagagagagagagagagagagagagagagagagagagagaggaggaaggaaggaaggaagaaaggaaggaagaaaggaagaaaggaagaaaggaagaaagaaagaaagaaagaaagaaagaaagaaagaaagaaagaaagaaagaaagaaagaaagaaagaaagaaagaaaggaaggaagaaagaaagagagatagaaagaaaggaagagagaaagaaagagagaaagaaagaaagaaagaaagaaagaaggaaagaaagaaagaaagaaagaaagaaagaaagaaagaaagaaagaaaggaaggaagaaaggaaggaagacacgaaggatgaggatggagggatttgacagtatcagcaacaggttttcaggagggagactcccaagacgctaaggcacatctcaacaaagagaggcatgaagagtagccagcaataagagaatttgtggaaagataataagaaccattgcaatgatctctccttatatgtttcctaatgccagttttacatattatggtgtgataattacatgggggttgaaggagaatcacggagtttgtactccattccaaagggacacatcttaagtaaacagccatgagagctgtgagggcagttggacgtccatcagtaaacagtggatttaaagaaagagaggtgctgttcacattgcagattttgtagattggaacagatgtgagaacggaggcaggagcttgccagggacagtaaacacattcgcgtgagaggagctgagatggtcttttaaggatcttaaaacttccacaggcttcctgtagtttgtgctataaaaacagttgtggagcgtaaaacctcctgtggctgcttagctcctttattacctcccggtgcctgaggtgcctgaggtcccgtggatctggcagaagagagtcagcacgagtccctttcccgcctttaccagtggcccctgagctagcaacagtggcatgggaggtagctggaaatggccagggtgccttggattttatcaggttcaggaatggaggggctttggggacaagggtgtgtgacatgacacaaaggaaagaagtggtgttgacagtggaagcaaagtgtgtaaccatcatagaaccaagccaggcagcttttaagtcagacatcttttaagccatccttgtgtggatgtaataatcactttttagtatgagctgtcaacagacagcaataacttttaatgagatctctaaaataaagcctttacagtgctcatgtgttaagactgcattgagccgttattctaacgctgtgttctgtctccctcttacattgtgatttattgtatttaggcttttgctgcttaatttcttagggaatgtgttttacatattatgctattatgctaacatttctaatttaaatgacttctttttgctacatctcagaggggacagaagaatttactttagctacagcatacacacacacacacacacacacacacacacacacacacacacacacacacacacatgaatagcgagaagaatgggcaggtgcagagcattgcctgttgaattatactgacaagtatgatttacgtgagctccttaagaacataacaggaatacaataagaacataaaagtcatgggtctggaccgggtggatgcaggagcagcctaagacttggcaatgttgaagttgctatcttaacacgaaagctcttccttgagagctgaaactcagaatagtaatcctgggaaaaccaggcaggctggtcctttgaagatgtcccttacagaggcagtcagttattgctgagtcatgagatgagtaactatattttgtgatgagtaatgaacattattgactgcatgcatttcttgctcttttgtagtgcgtttccttctgactgtattgttctttactgcgctcccagcttgctttatttgcctcccccccccttctttctttctttgtttggcttcccatcctagcaggagtagtcatttgtgacctaattgtgttttcagatagccagctttgtgaacaagtctgccatagacatctcaatcctccagcggtccttggccattctggagtcaatggttctcaacagtcatgacctctaccaaaaggtagcccaggagatcaccattggccaactcattcctcatcttcaggggtaagcatgctaggcactcttgtgccttgtttctgggaaactcactgtgatggcctgggaaacattgcaaactggttaaattacgtgcacaaaatgtcttgacttgggagcaaattagccttattggtcatgatacatccccagggaaccatacatcactcctcagagtctaaatcacaggatacattcagctttggtaaattttggtagacattggttgagttttactttttataagacataataggatactttcttctcttaggttctcgatagtatctgtattacctataatattacctgtgatattttctgtgacactgcattttcataactgttttggcattttaagtagttagttacttcaggttacatattgaaacctaatgtttggagctaggatccatatggggagagaagatgtggcacttgtggctttgagtctaggtcaccttaactagaaatttttaaaggcaggcttcttccattaccaaacttcagccttgatgaataaaatagtgaaagagccaaacacatgcatcattttcttaagagcctgggtaagatgtggaggataaacaactgccctcaaaccctgccatccttctggaggttccatattttctactctttggtaaactagaagggtgcttcttataataacactgagagggactctgttatgctgtgtggcttgttttatttaaatagtggtgggtgttgggtagtggaagaaacattgtgaactagctcacataagaagagtgttggttggaaggatatgaggatgccttgtaatgtctggaaatgatgtaaggcaatgtgttttaggaaagactttgagtggcatcaaggtgactcccacctctgttctcttaggtcacattggcttattcttatagtgaacctgattgaaccacgtgggatgtgtgtaactacgtctaggagtatggattggttaggccagcagttctcaatacactgaagatgtctgcttttgtttgtagtgtaaacgacaaaagtgcattagatggttaattcatttggaggtagggtgtgagcagaatttacaatttatgtcagggaagctgtggactttgtccctagagatttagctcaatcttagaaggatgggttttgcatgtagcttcacttaaaatgacatgggtttcactgtctcgtaattggagcaatgttgacttcactgtctgaatttctgtttctgaatctcagaggcacaaatgttcatttagagtacacttcactgaaaaaaaaaaagcctgttgttcgccaagtactgtgctaaggatggaggtgtggtgtctaattccatcctagatacagcagcagtaggaaacggtatcttccctgagtgtagctcttaggctcttggcttctgccttaagcccttattcactgttcaccacttggcatcccttggaatttctgccctctttctagtgaagaacaaaatcttaaacaaaaagttctaacatttactactgttacagcactagtgtttgccaacagtattttagaatatgaaatgttgctatgggaacaaagctgttttcttttagataagcccaggaatgctgagacatctacaactgttccaatacatgtatcaaacattggatagaaaatcacacacacacatacaccccacagtatcatggcacttgcttttaattcagatgaagaagagagagtaaggcagctggcgtcatgtacttctgggtgatcacttttgataactggtgtaataacaatcgtgtgactacctgtccagcccagggatggagggaatatgttaccatgtcacccatggctgcctgtattttctaggtcctgcctttctcttctgttcaaggactgctgtgtttgtgtgtgatactgagccttaccatggctgactcttctgatttcctggtttgtgtctttacaggacagaccaagaaatacaaacttacaccattgctgtaatcaacgcacttttcctcaaagctcctgatgagaggagacaggtaggtctcagttctttagtcctaagactgggatcagtatggggttagaaactccttcttcccctctgggagttctcttcacaggacagccatgccttgaaggctggctggggcataggaggagggagtaaattaaatcatttaacaaaccaatctatctaatagtagaatccatcataaattaagactatcctatgactaactcagtctcagaaatgtattagcaacaagatgtgtactttcttattgaaagttaatgttgactctaataacccttgactttaagacgtgctcattagaacagagatagtgttacagtgtttaaatttaaaatatcggagtgattaggacagtgagccctgaagatcagtatccaagttcacaatgacctgtttgtggatgttcagtggagacctagaaagtagaattcacaccatctgtttacctggatgcctctagattgtgtcagctgtggcaggtgtacacctttttctgaacttgaccttagatgtaaaagagcgtttgagctggtctacattcaatattggcatttttactagcataattttcttattaaaggaaaggcatattcttttcacttagtggatgaggaaaacgaggttccatggagtaaagaacctgaccaggtcaccagagtggtgagaactagggctggaagcccaacctcctacttggttttaactgcaaagaattccaatgaatgcctggcaatcagagaatcccagaagtcatgaggaaatgaggcccactttctcactccaatagattaaaatattacctaagtatttataccttgaattttacagaacaccccctttaaagattgatgattaagcctgggacattgtatccattgtgctactattgaacaatttgttgtcctgtttggggccatacaaagtcatagcaagccattgtcaggatttccttattaatctaaatgtatgaaatgaatttggaaggtccaagctttggtgtctccccttggcgccgtggtcctgctggtcctatgcgctggcaaatcctttcttgctgcaaggatgaaggaatgtgctcttcggttctgtgggagaaggcacagctgctgagtggccagatggatcttttcctttgctgttattttaatgaaagatgtgttgagacgatgtcttccaaatttctttacaaatacttaatagcattataagcactatttgaaaataacctttcgttaacaaattcaagatggagaaggctgaaggacttttcattcgggtccctgggtggagccttacagtccttgtgctcaaacatacccatagcatggttctctctttattctgtggacattgctttcacgtgtgcattttcccaccaaagggagccacccacccatgtgcattgttttttatttacagacctattttaaaagcctacaaagatacttgtggccaacttcccatgtcagttgatctatagctacatctccatctgaatgtttatgccatccaaggctatactatcctccctgtgagtgctcatggttattgcaacagttcacttagagttgacatatgtccaccaggaggacaaggatccttttggtttctctctaatccagctcctcctctaaaggaaaattgtataaaacacttttgattttctgtcaatcccttttggtctgctctgtgctcgctcaacactttctcttatgggtggaatacaggaatgaagcatcctctatgtccttgaggcgttcattcagaaaaacactgtggataaatgattaatagtcattgcatgatgaaactgtcttatttcttctaatcgtgtagaccggtgagctacaccttcttttcctgtttgtgttgttctgataataatgaacagcaatttgaaaataattttataaagttttaagaactaattaaaagaattgtgagattctttggtccttctgtttatatgacccaacaaaagaaatttgaaacagaagaagccagtggaccattgtttaggtgaaaggaagccttctttctccaatgtggaaggactagccttctgggttgtcattttgcctgcttctgggggtgtgcttggcctgcattcttgattttaagagcatgggagagtacttcctactgaatttggacattactaccacctcaccatccaggatctcctgacagaatatccaccctttccagtgcagagggtcagtagggtgtgacactgaagctgccagcttctaacagttgctctgaatttccatcccctcttctctcccacttgctttcctttctgtggtggcgatggtgccttaggttgatgtagagagcaatgttgacatccttgattgccctctgactgtaagtctccgtgtttcctctgtcagcctcgataaccgggcctgctctcccagtccgctcccctcccctcccttgcctgtatgtctccttgttagcttctctccccacgctcttgattctcccagctttctgcaaatttacttttcatcttggtagaacttaatagttttgctttgtagtggtagttcagcgccttctacttagtgagaattgcaatgccaaaaaatactccccagcaaacacaaaaaagaatattttggtgtcttcctgaatataagcagtatttttttatattctttgagagtatcaaagctgtctttcactaaatttcctttagtacctgctggtactatgattataacaacactctgaggctcagtcctcttccagtttgctctctgataaacacagtggccaaaagcatcctggggaggaaagagtttatttcagtttataagttacagtccttcgttgagggaaaccagggcagaaacttgagcaggagccactgagaaattctccacactggcttgctacaaagcccttcatctgccagcttaaacatccgagccccatctacctagggatacgactacctgtatcagtcagccgtcaagaaaaggcctcacatacatgctcacgggcaaatctggttgaagcagttcttcagttaaggttcccttttccttaggtgtgtcacattgacaactgacgttagttattgcaagtccatttgataaagctagccccaaatcctctataccagtcagtaagtgccacagcccaaaatacagaaaagaggctttgctaagtgggtgtgaactctactgcatagcatctgcccttcaataatccagacttcagtaatccggactctgttcacttgcataatttcccccacatctaggggctgtgcccttcattttcagcttgtacagattaaaaggactggcttcagcagacgttagacttttgactctttctttccatcttctggttgacctgcttattgaacagtacttcctttataagtaaatgtataaagttttaaaaaagtaataatgataagagccatcaaagacacagagagtctcagaggcgtggggacacttttgtagtgtttgcgtttttaattcttttttagaaagagcagacattttttttaaaaattctactttgcttttggtcctggattttataatccaaacagaatgtacaaaaattaatttgaattggccatttcccaagaaatactgctgatatacagttgagaagcacaccctaggatgaggtagcttctggccatcctgacgtgagcctttctaacggaagcctttgtgggcatgttttctttcccaggagatggcgaatattttggctcagaagcagctgcgctacatcattttaacagtgagtaccccgttcactgaatccaccatgttagggagaaatgtcctagttagtgtctgtgggttcttctgtggctccacactggagcttgaacagtagggccaatccaggaaggggaagtatgctttagaactggcacaggcagtgctctgctgcagccacagcctcggcctgctggacgaggcaaggaaacatttagtgcacctcagcttaggtgtgcaggcaaagaaaatcagaaactccttggctcaaaaaaaatccaccagtatgagctctttttgatgaggaaggtggttggaaatatgggaggttctgggagaagggacttaaaattcaggggaaaagaagtttgcaaagtcatcttgtcagcgtttagagatgaaccctttaggaagggtttttttccgagctattcaccagttattggaaggaagcaagattaatacttatgaaactaacaaacagcaacgacccaatctgatgttgtaattctacagttcagcaagcttaactcacgcatgcgcacacacacacgaaatataggttttaaattcttctttatatatgaagaagaaaacagatcaaaaggccattgctttttgaaaggcattggaaagaaagcttctcacttaaaattcagcaagggattggtatgttctacagcgcggaatgtgccacagcacggtagtcacataagagggcagacccaggaaataagagaactgcatggaaatgagggacacagccttcactatggtttcctagggaagggatgcttcagagaacacactccagccatgtgacactcaggttcaggaatggctagttcagtgatttctgtaggttacggtgtttataggttgtgtctagtctcagggtacctggctttgggtgtttgggacactgggaagatggccatagtcctcctagtttgcatatacaaatacttctgctatgttatctctgcaaactgtttggggcttgtgctggagtgcaggttctgcagggtaaggaagttctcacatgccagaacttcagaatcatggctagggttaactttgtgctctgaatcttttctttaataattttaaaaaatgtaatttgtccacaatgtctctagcatgtcatccgagcacagcgggccatcaacaatgagatggcacaccagttatatgttctccaagtgctgacctttaaccttctggaagacaggatgatgactaagatggacccccaggaccaggtaggtggatgctccacacaaatgtaatcagagacagagacagtacgtcaaatgtctgtcctttagctaccctcaaatccggagtcttatatgatcccataattgttttcttgacatctcagaacttggacatattgctttaaagtttaggtgaccctaagatcagagaataaaatggaagggctagtccatgaggttccatatgcatgcatgtttttcctttacatttaagagcttgaggttaaagccctgggctcttgaccatattacattaagtggggtcaagttcccatacagctgagggcattcaaggccttgagtagcattgattctacaagtgggagtgctttgcattctccagtatctaagaccaaaggcagtttgtccttttctcccgtgcaccctcatttctaggcctgtgtttttgttggctggccagtttttctaactccctgctacctctgtcactgtgtacaaaacattctgtttccacccagaaggctttggggggagcttccctgcaggagggtagagggaggaagcagctgggagccccgcccctgctgtacacattttcaactcaaatagtggtgcagctgtggaaaggaaaacattcgctattggcacatgagggcctgatctgctgcagatgctgagctgcacatgtggggcgtgtggctgctgcggccctccattcatgctgagaggccatgtgagtaagactgaaggagaggcttgcataggccaatgattgtgccccgtgctttttctctgaaaaccaagattggtgtagtacaagggagacaagacaattgttttgccacttggagcgagggagatcagtgctcttaatatggagcaacacgcttcatttgtaaacacttcccctcgttgaataaatggcgcataacataattaatcactttatccattaactacattcacattgttataaccccactgcatgtatcttcaggcctccttgtatgtggccagactgaatttctgtgccctctgaaaccatatttgctctcctcctatccctccaatcccttctgggtttctataaatcacccctctgcttcctgtttttattaagttgactcttctacaaagagttgatgagcagaaaaaagatattagttgctttctatctagcctgttctactcagcaaatttaagtttttaattataatgttttatgttttagattataacataaaaagagtattgccctcctccttccctctccccagccttcccatacacccacctcccttgctttcaaattcatggcctcctttgctttaagtgttgttgcatgtatctgtatttgaactcctaaatacataaatacaacctgctcgtccatatactattacttgtagagatgatttccgggctgactagtcggtcttggatagttagctgatgaactctccctggtgaagactgtttctcctactgttagcaggccttagttacttcctattcccccctcccacattagcgtctctattggtgccatccttgttccagtgttttttatgaagccacgttggtgatacgtcataggtgctgcttcgctgacatttctcggagacatagtctcatggggaatttgtaaggttcttccctatggtaagatgttggtagtttgccaggcagtggtggcgcacgcctttaatcccagtacttgggaggcagaggcaggttgatttctgagttcgaggccagcctggtctacagagtgagttccaggacagtcagggctacacagagaaaccctgactcgaaaaagatgttggtagtttgcttctggctagactaacaacatcccactgtgtttctacaccacgctcgactttggaagaacatttgtttttgcctttgtgctctcccttttatttttatcttgtgctagtttccatgaagtcaggcctcagttgagtgagagatctctcctagtacaaacactgctaagaaccacatgtacctcttaattagcttcaaacagaacatcactcaaacactcttcaacttaatcttcatcaataatagcccttccattgtatggtgggcttttatgtaggcctccctagataatatttatcattgctccaagtgccttggctggaagatagatgaatgccgagctggagcagagagaggcctgagttctaactcaggacacgacttgtcttttcgctcttctgctttgcctgaatgcagtgattcatttaggctctggggaaaggaggcggcgggggccttctgtcatgcacagtgaaagcagcttgctttctttttgccttttttcttcccctctctgtatcctttaggcccaaagggacatcatatttgaacttcgaagaattgctttcgatgcagagtcagaacctaataacagcagtggcagcatggagaaacgcaagtccatgtacactcgggattataaaaaacttggcttcattgtaagtactctgtctccagtacactctctcctcccaccctccccatctgacctcagtcgcatcgaacgtgtggtcctcttgtgctttgcagaatggtttccacatttccagatgtttagctggtttaaataggatctcatggaaatctcctctggctgcggtgaaatggaataagttgcacaagtgtgactaatacttcgcttgtttattcagttctgattaagtgtaatgcagagtagttaggctggaatgcatcgaaccgtcctgagcctccttcgaaagccactgtggttctcctggtgggatgaatggtgacagttccaggaggcatcttattattggctggtgattggattactcagatgcattgattccaatctaagggaagctggaagtctcctggagttgaatcatgatgagatttatatagtttatggtcttaaaaaagtcttaccttgcttcaaatgttaatgggttgtatcttacacacacacacacacacacacacacacacttcatatatcagaacacaacgtgtcttgaatctaacctgctgttgtggttgttgctgctaatagacaacatcaccagttcgagagtgaacttaaactcacttgaaattctgcagttgttatattaggtttccattttagcctccattgtaaatgacacaaattaagatgttggcttgagtggtgagaaatcactaggaaataatttttacttcagatacatcttcctggaaaacaaaacaaaacgaaataaccctcaactaggttttgatcatgccaaattgctttctttaagtatctagtaattagctttttatttaaagcatgtcaaagtgaccattttttcaaccttttaataatgtctcttcaatttcaaaatgttcaagctagggattttatagtgttactactgtctttccgagtaagagtatttattgataacacattcaacgtggcagctacttaacatttccaggcagtgtttgctacaccaaacactggtttggttttgacagtccatctgacactatagatgaattgagttggcgggtgaggctttcatgtgtcttagtatctttgatgccacctctccacctttgcgtcattcctttctgagacacgaggcccagttaaggtggacagcatccacttcccacttcaccgcctttgccttccaaccctgccccgtgggttgggagataaagcataacgacttcacatggaagcaatgcaggatcgtcttctagtctggtcttttctacctacaaatcatcaaaatcaccgagtagagctcagcctggcactacctggcatgggtctcacttgaatcacgtacaagctctcaaacaggccctccctgtgtactgttcatctgcccaaggcctcggtgggcctacggtgcagcccggagttcagaggatgctgggttcctctgaaggtgaatgggtggcaggcatgaagaatcaaccctggtgttgcagcctgtgtacctacatcacaagccagggatgatacgccttcctcggtgtctctgtgttctgtctgagcatcattggtaaagcctgacccaccttggttttcaagtgtaggccgctcttgaccatctctgtcttggagtgttctgtttcctgagtatgggatgggcaagggtggagtgttttgtctgaaagtcagttcgatgtgactctaaagactctcaaatttatgcagcactttccttgaggattcaaaacgttattttaaggatgggatttaaaaaaaggcattcactaaagagtagcccaaagggagcactggtttcctggattttgttctacattttttttttttaattttaatttttaaaacttccttagaagcctatcccaggcttaggccacggtcttgcatcagagggttgagaaactggaaagacttttgagtaatgatctatgctgagaatgagccaacagtctccacagctgatatttcactggcgaattcgtggccaaggcaaaaaaaaaaaaaagcctaggcgcagactcccttctgccacctagcggctgctctgcagaaatgctacaggctgtccaccatggtctcagcagatttgtgttgaattctttctgagcctgcaaggcaaacaccatcctgcctgtcaaaatctgaacttggaagaacactgagaagcttggataaaatttgatttctttgaataaaggttgaatttatagaaagaatataatttcttatttcgtttctcccaagtagacagagcccaggaagcagtaagttgatagtttcttagagtccatgcaggccacatttcagcttctatttccctgcttccaagccatgggctaagaaacctgtcttttaatatatctgtgattggtttccttggccgcaaactggtcacagctttttgtttcaaatttaccaaagcagacagagatcttagccaccctggagccctccttcattttaggaagtacgtgtcttggaaaccacaggcagagttttgagttcagagttctccagaggaacagagtagtccgtggtgtgtgtgtgtgtgtgtgtgtgtgtgtgtgtgtgtctgtgtgtgtgtgaatttattaactgaggttaaaaaacagagctaagtcatatccaagaagccgagagcctggcagttgactttgtccttgaagctgatgccttaacagctgcccgtcattgtcattcacgagagcggtgatagacagtagttgttccatctacatggtgaggtgccgtgatagtcccaggctagcaccagaagactggcatgatcctggaaggcccactggtcccttgtccatgaaagctatcggaaatgctggttctgctgtcaaccaagacactagcagagaaatacccaggaaaatcagctcagctgtgagagggaggccagtccagctgaaggcttactcgtttaatctggaccactaaagatggtgctatccactctgtgtatgtgtgtgtgtgtgtgtgcgcgcgcgcatgatttgggacttgtcttcctacagcaatcaaggcaaccaggacaagtatgtcagtgagactccttgaatggccgattctaactttgggcaatttgacattaaaagcatcaatgacaccattatagaaggggctgctgctccaacaaggcagaagggacaattttttttattagatattttctttatttacatttcaaatgctatcccgaaagttccctgtacctgccccccaccctgctcccctgctcacccactcccacttcttggccctggaactcccctgtactggggcatataaagtttgcaagaccaaggggcctctcttcccaatgatggatgactaggccatcttctgctacatatgtagctagagacacgagctctgagggtactggttagttcatattgttgttcctcccatagggttgcagacccctttatctccttgggtactttctctagctcctccattgggggccctgtgttccatccaatagctcactgtgagcatccatttctgtatttgccaggcactggcatagcctcacaagagacaactatatcagggtcctttcagagaaatcttgctggcatttgcaatagtgcctgcgtttggtggctgattatgggatggatccctgggtgggatagtctctggatggtccatcctttcgtcttagcgccaaactttgtctctgtaactccttccataggtattttgttccctattttaaggaggaatgaagtatccacagttggccttccttcttcttgactttcttgtgttttgcaaatgggacaattattttgaaggatggctgtttgatggaagaagtggatggacttcatgctccttagctcagcatcccaaaggaacgggctttcctaatgaaataattccagaacacacacacattttaatacagggtctcattacagagttctaaacttcagaattgatgtaaagttactacgtgcctatgtgcggttgtaacaatacggaaaagcacgttctttaaaataaagctgcatggtattgtaagatgattatcactgtcagtatcaaagtgccaggcccctttggggtggcaggcagtggcgttggatgctgccactcttactgaaatggaggagccacaaggccttctgtagaatgaccaggcaggcaagagctgcacctctctgacagtaaggactgtgagaaacagagacagtgacatgtctggccagggctatgacagagtctagttttgactttgaatttgtggctatgtgagttgagaatttgctgtgttcagtggctggggcaagtcctggtagctttcattagattttcattctgcttttcagtcaggacatagaataaaattgattaaaacttttttttctagtgcctccccattctgtttacctttactaagaaactaaaaaaaattttttttaaatatagttttcatctattgtaagttgcattaatgtgagaagttttagacattgcctttaactttctcagagtcatcttataagataaaaagaataaaataagaaagtagcaaagataatatgcagtgggaaatgtactccttcaggagtaagctctatgcgcagctattcaggagaatttctgacttgagagattggaggtaatcacgcagttacacacgtgtgattatacataactccagctgcgggcttgctgtcttccagtcctcctgagaggagatggcgggcagtgaagtgagctctcttttctttctccttcctcccttcgttgtcccagtccccacactgcagaagctgtgtcgctgcttttccagtgccttcagatgtaagtgttatgagaatgccacgggagaggaaacccagtgcctgagttctggtagctcgtactgtttctctctctcccacttagagcacgtgactaatgcagatcagttcttcagataaagtagagcccaacggtagaacattttcagtcagcatttcaaggcgttgggttcaatttcccccacaatgctagtttgtaaatacataaatataaatgaggaaggtataatatccaactagcaataagttgtgtctacctaattatcagacaataagttgctcagtgatggttggtgcctggaagcagtgcaggaatctagatgtttttactgtgaacttacaaaagctaccactgctcttactgaaatggtgcccggtgactcacccctgtggcataaggtggaggaaaagtggaaaccatcggctgtccccggggctagggagagactgttctgtgccctcggtaaactgcggatctttggcacgcccagtgtttgtcacacaggaagaaaaaagtggagttggctttgagagcgagggaaagattataacaattttttaattaaaaaggggcgagggttgaaatacatagtcaaacctcattattaatagattccacgcttgaaaattctcctatttatctaaatttctttgtaactgcaacatgaatattccaggcacttttcagggttactcttggatgtaagtaagtgacactaagccacttaatctgtttggacgcagctccgttgacagtgagcggactcctgtgtcagccctcacatccaagccaactttctgcagctgacctcaggttgcatcctctcttctctgtcattactgttgctgcttgaaatggcacaatgttgacgttttggtgaagttcctaagtagtcgggggctttggtgtgccttatggagaaacttcagagtatatgttttaggtgactttcctataggaacgcattataatgcctggtggctacatgctaaatgaaagaaatgaagcataaacatcaaataagatgccttttaagtagacgtgcacttgaacttggctatgtaggagtgtatagttaacaaaaatagcaaaacgaatcgaatgctgtgctgcaccgaggcgccatgcagttgtgaatttagactctgtaatcatgggtgaagcattaccaagactgcttagtgggtaggggtgcttgctgccaagctggcacacctgagcgggagtccctggacccacaaggaggggagcgactcatgaaggttgtccctagagttcctcaagtatggtctctcgcatatgtgtgctcatacacattcacacacaaataacatttaatgaattgtttaaatggagaaatcatatgtgctccgaataaggagagtctggtgcgtttggtcatgcctgcggtgccagagaacagtgtcctgtttgtggagagtggagaagacatgcccctctctgcattataaagttttgtgtgcactccatgctcttggaacagtcaggaatgtggggtgggaagggcagtacaccttacaggcgattttctctattggaggtcaagagctagcagcctgtcttgtgttttcgcacggtgcccaccagggtattgtcaggtatgcaccctgccgatgtgaccccgatctccaatgctgtacaaggacagcattagttagagcggataacacatttgtcgaagaaactaagccatgacagttactttgagttgaggcctcacctttgtggtgtgtgtctttcttttatgtgaaggagtttgtggaaagcacagtatagaatgagctttgctgagaatccagccactttcctactaggataacatgataattgggttgtattactagctaattccttggcttgtatcttagctactaatatacccataaccaatagatcagaaaagccaaaggaaagtaaaatatatgtatagtttctaaaattctgtacatattagcccgttagaattctggatgaaggaaatctgggctaatattagtgaggattgaaggtccatctagttcctcctatcctgggaccgcacgggggatgcaggcaaagtgattgctagaaacttaaagcaatgtgtgtttcctgtggctcttttatttcctttcattcttctttcttgttttagacatctcagaatgtagccctggctggtttggaacttgttaggtagaacatggtgtagactgatctcatagagattgacttgtgtctgcctttggagtactgggaccaaaagcatgcagtagtaccatgccctgctctgtgtatggtctcaagcaggtactgtgtggccttggtccttggggaacagttctccctctctcaacctccttgaagcttcacgcactgtcttttcccatctgacatctgcacgctccggttctaataatttctaggtacagtcttgtttcaaattgaggtaacatggacttaaaccaagaacataaatttgggtagttagagaaggaaattctgggagggtttaggagatgggaaaagcatgatcaaaagtattatatcaaaacaaaacaaaccaacaacagcagcagcaacaaaccactctagtcactgatacaaccagagcagaaataaccaccaggtggcgcaaaaccgcagccattagcttccagtcaccctgctggctctgttgcactggttggcaggtataggactaagtcagggctcttggagtcaccaagcatgcactggtgccttagaaaggactagcagctttctaagatgtctaactgtcgtccttgtgagatggaatttccctgctgctcctgggaggtgaatttatcagcacccccccccaccccagacttgctggagtctcgttccaagtgtttctcagtctgctgctaggaaagtcttcttagtggagcatagcatatctagttttatgtgttatcctgccttatcatggaagcacagggaaatgtacttgaaatgcaaaaatctaacaacagtaataatatatttttgaggttcattaaaccatgtggcagcaatgccttcgagagatcaggcgtggtaaatggagtcaaagtgagaaagcaccagaagatgaacagtggtctggccagcttggccatactctagtggcatttcttgtctaaattgcacctcttgacaagcatatttcaacattttctgttaagctgtataggcccaggttcattctctggtctttcagtggcttgatcatgtgcagagaccacagttgtctgaaagctggggttgacaaacgagcagaagaaagtgagcgagtgcagaaagctctcatccagagaagatggttggcctcactgcccaccgcagaaccagagtggaacagttcatcatagcagggctctgcccagagcactgcacactgattcttgaggggtttagcagggtggtctcaggccaccccaaagccacccacatcacttgcagatgtgtctcactgctccgaaatagaatggaccagactgccactgtctggggtggagagtcagccccacatctccttttgtgcagacttgtgccgtcattgccatttctgtccatttgatgattttatatatgtgatctgttactccctgctctctctcagcaagggagagaacaaagtggtagagacaatgtggaataatcccattttagcacttgtaatggatactgtatggagagagaacacatggataatggcattattaaaactttttttttttttaaagaaaatgtttttgaaagcaactagtgaaaactacaaatgtccgggcatggtggcacacgcctttaatcccagcacttgggaggcagaggcaggtagatttctaagtttaaggccagcctggtctacagagtgagttccaggagagccaggactacacagagaaaccctgtctcgaaaacaaaacaaaaaaacaaacaaaaaaattaaaaattaaaaactacaaatgatgattgattgccatgacaatatctgagttttatttttctggtagtttatttttttttattttttatcaattttagtgggaaaagtttttcaggggcattattggaagtgggaaaaggaaacaggtttatcttatcgctggtttctcagcttccttctgttttggatgctgccacccttggacaggatgggttttctccttgtagcggtgatctgctttctgtccactgggtggcacagcagaacaaagatgtgaacagggacctccaaggatgagaaggagcaactcttggttagcagtgtttaacttgcagtatatgtggttctaagaggtttgggaggattccccaggtcttcctttcagttttaccttgaaattcataagaatctctctctcctacctctaccctgtgcttataacagatctgcgacagaagggccaatgcattaataagggtttattactcacctctgtgcttcacataaactttcctggcacccaccttccttccttccttcnnnnnnnnnnnnnnnnnnnnnnnnnnnnnnnnnnnnnnnnnnnnnnnnnnnnnnnnnnnnnnnnnnnnnnnnnnnnnnnnnnnnnnnnnnnnnnnnnnnnnnnnnnnnnnnnnnnnnnnnnnnnnnnnnnnnnnnnnnnnnnnnnnnnnnnnnnnnnnnnnnnnnnnnnnnnnnnnnnnnnnnnnnnnnnnnnnnnnnnnnnnnnnnnnnnnnnnnnnnnnnnnnnnnnnnnnnnnttttatataaatggatttctggagcagaaaggcagcatccggcaagtgaatggatggcaaatgaaagatggaagcaagcaaacaggagtggtgttcttgagagcaatccagttctactgcagaccagtgttgtgttgtgcaatttctcatgcacttctaccccaatctctgctaccaggcttcagatttctgttccattgcttgttagtagttgactttgctcagtttatcttatctcttttaatgactcattagcaaggagggtttggtagccaatctacttaggcttgtagtggagattaatgagttaatacatagcagaaacctgactcaccttaagcagattttcatacatttttttctccaccttgtatattggtgcgtgtgtacatacttgtaatatcggtgtgtgcatatacatgtaaaaggacatctggttagtctctcagggtcatggccaggagccttctgtcttattttttgacttggggtatctttctagtatctggggctcattaattaggggaggctgtctggccaaaaagctccaaggatcttcctgtctccaccccttcagcacagagcataagttgacttggctacaaccacacataggccaccacagccaacttttatatgggaaccggtcctcttgtgagacccttatctgaactcaggtccttatgcttgctcagcactttgctgatggaggtagccccgcccctccacctgaccataacgtagtctcactattgatataagtagctggtggctgaaatgagctggggtgtgtcctatccctgctgaatgactggaacagttctttatctgacagaagccaagtgagataaggagtcacagcatcaagcttcaataccagcctcagtcctgggaaaaacacatcccagatccatgaattttagggagttttcctacaaatgactatagggtagggacccaccccctaacaaataccttttgtgatgaaagagttggttatgatgatcattatgatcatcatgtagatgcatttttactagtaagcatgtctatttagatctattcttccattctaacagcgtctctctagacactctaccatgagtgtgtgctctcatgaaggaggaacttataataaaattatgaaaggctcaaaaccatggcatgcattaagttaatttcgctgcataaaatatgaagccttggacggaaggacatcatggagttttcgtcttggagaagagctcttaccgtgtggtccagttaacctaaatttcacagtcatacttcatctaccgagtgctgtgattacaggggcaaggcttacaccagcagacccagcttacatggtacccttttggggacacccaggacctaggaaggacagcactaggaccagtgtgtgattagagtctaacttaggatgagcagctatgaattctgggtcacaagctcaggttcctccttttctaacccttagctctaggcacctgggtggtgtatggactctggaaaaccttaacaaagtggcctagagaacaaagctggccatcctcggggtcattgaagagctgatgaaatggccagattagagactcataattgagtcatcagctttctttccattgactttgagtttgaccatcttgaggaatgccacatgagatgaacatgcctcttgatgttgcccctgtctagacactacacagttgcaataggttttatttttttttcctgtttgccaaatgctcatcatatgatagtgtcattcataactttgaattccatgtgctgtgaactcactggccatattcacttgaacaagtccgtggcgaagctggagctgggagcagctccatggcgtgggattctaattctggagatggcattctagatgtgtaggaagactgtcaaagcctttccaatgggaagggactgaaccagtttgagaatcacatggttatataagaccagtccccttgcaggtatctcagctcactctttgttttgttcttattcattctgaagaacgggacaaagggattgcccaacgcattcctgtaaacacgcgaacatttgaatggtcactctggcatggtgcttgggacaacacactgacaaagacgagggtgaatattactacacttgctcttactctttaaatgattacattccacaggtagttaacatccttgatgtggagctttaggtggtccatggggagtggctggttttatataactgaagagttgcagctgcttccccgagagtgggagccttttggatgttttaaaaaaacctcagcccttataggtcttctgtagtaatatctcatttcatctcagagatgcataggtatctggtattgataggaacaaaacattattttcctcgttcataagattgcagtcccccttaaggatcttctttgttctgctggacaagagcacataatacttgcattctccctttgtatagccaaaggtgcacactacaatgtaggcaagacattacaagaataggtaaaaatggcatatctctatgtatcttttttgtggcatccagggactgtaagggtggttcacaggacactctccatgctcttagagctcttggaaaagcactaaaacccagtgggcttatactgttgcacataatattactatcagtgaggaaccacactgatcctcttgcctttctgggaaggaattatatactacgcgtctcaaatggaacccacagtagcacagccatagatctgttgggtccaaagctgcggagtacctcactgaatcagccttgcatcctgctttccagggtgttaggtgaccttcataaatgccataatgaaagtggtgacacttctgtctgcccccagctttcctgccactcagcctcagggctatgctgtgccacctgaggaggagacactctggatgaaaggcctcggtctgcagaagctgtgcatgtccgccaggctgcatctttcctctgccgctgctgttctcagtgctgcagtcactggttctctttctgggttttctttgccttccccctggttcctggtctggagacccttctccaccccttcttccccttcctacatagctaaacaaagtagtgaagacagatattttgaagatccagtttgtgaacgcccatcatcctttattcaacagcgacatcctttattcaataactggtcttgtcgtctcctccacccccatctcccgttgtttagggtcctaaagttactaattttggtccttggtgctcttgatcagtctgcagggctatctgtgcttgtctgagaggtgatacactaaggtccttttcttctagttccatagaaaggctttcctatatctgttgggcagctggcttttttttattcctgagctggggaaaggaggagggctgctgtgtgggaatcagtgtggctgtccagccagaggttcagcagtgagagtccgtatgggagcaggtctgttaggagaacagccaggtgagggcccagagaggaaagctcaggggtcacccctctttctcgtccgaggaaacattgtatgtcctgaagctccttggagaaaagcaacttctacctggttgggtgtggataagaatctgtaccaggtaccgaaggctgaagaagtgcctatgggttccagctgtattgaacaacccacttcctgggccaaagctatagcttaaggaatcccttaaggattccaactgagaaattgcatctcccttgcatacctgtaaggtgccttggatgatggagtagagtgtggctatgttaactttctctacagataagaaccaaattgtttggttaagtctaaccagttattagcaattttgatatctaagactgaatgagtgagcgtcaagtcacaatgctgagttaaggaaagactaggcctccctggacctcaggtaatgaacatgctgccactctgggcctccacacatgctgtttcctctgcttgaagttgctttctcctctgcagttcttaaccctgctgctgtgcttcagagttgagtagcaagggctgcccacactttggtcccttcccatttccggggcacatccccttgtattgttcctgctctttcccccccacacccaatacctttccgctgatgtaggaccttgtttacctggcacacccagacacagtgaagttcattgaatagacgtggtgagtgtaaatctttatataaagactttatagactatatatatatatatatatatatatatatatatatacacacacatatatatatatgtatatatatatagactatatatatatgtatatatatatagactatatatatatatatatataaagtctacaaatgcccttggcaagactataaagtgcccttgacgttcaccaaaggaataaaaatatcacattagtggtggaattttctagtaaaggggatgatggatgtgagtaggctgtggtgaggtgggtgagcagcggtgatgagctaggggaaaaatggaaaaatagaaagtttccttctgtttctgctcctttgaatccaggtcatggaagaatgcttgctggagcatttgacgttaggtaatttttaaagtaggaagtaattttaaattattatgcctggaattgaggatttcacagtggtgtgagtataataggaacttaggacagcttggggagaatgttggtgaacactgggaacagggactgtgggaatgcagagggaatgatcaatgtgcaagcaaaggtaaaatatgttggggttggtgactcgctgggtgatatagaagagcctgtatagatggagactggtgttgcttttcccatatgcaggacatatagctttggtccaggaggtgggttattcatttatggaataggcatctctggtctgaatgtgtgccttcctcccccacacacattctgcatggtgatacagaggccttagtgtaggcagtagtgctcccatgagagaagttcagtgagaagccatttgccttccttgctatgaggacagtgttcatagcgccatatttgagccctctccaagatgaggaacctcctgtctgtgtgaggttggactcttcaatggcttcacaggtttgagagaaattttctgtcccttgggttaccgggtttgaagtggtttataacagcaggccaaacactgtgtttggaggacattgaaattattgatgggccttcccattggcagtacccagaggaccattcaaaaggaaagtaatgcttggttcttcacatttactccagagacactaatctgaccagtgtttttgtttttgttttttgttttttgttttttgttttttgttttttgttttttgttttttgtttttgtttttgttttttgttttttgtttttatccaaacaagaaagctgaagtggaaagagaaaagagaattgcttgcatccatttttataaaccccacacactgggtttggggttcctttcttcactcattgatatacttgcttctgagaacttcccaggctgggctgagcctcaaagcatactgggtcaccagagaatgagctgatgagggaacctgagaaagacttgtcatagccaagagttcagccaggaagggaggccagcaccacctgcacggggggtggggagttgtgcatgtgtgtgtgggggggatgtgtgtgaaggatctgcctttagcagaggagacttctgccctgggaactggcctggatcctgagctgtgactacagtagagaaaagggagtagagaggaactgagaagggccgtgccattcggagtagagccagcaagaggagaatgccctggtgaccttatagaaagtagtttcatgagttcatagcgctgagatcatgccccactggtccatctggtatgaatcagttagaaatatgaagactttctggatggctcaacaactttctcaggaaaagaatggtttttgtctgtagttatgttatgaaaaatgtagaaaatattagaaaaaagaaaatcacgacaattttatcaacaaaagaaaaatggtaagctgttgtcaggattttgtccaactttctcctgtgcatatatttgtcctttctacctttctcctgtgcacacatgtgtcctttccatctttctcctgtgcacacatgtgtcctttccacctccctcatgtgtatacatgtaagacaattagcttcaatactcaggataaggtctgagtcagtgagtactagattcatgtttacttgtggttatgtgtctgtgtgtgcctgcataaggatgtgtgcttgtggttatgtgtctgtgtgtgcctgcacaaggatgtgtgctcatttgtttgtctctgtaccagggagagggaaagttataagagagactggaaatgggatggcctgaaactaatttgttgttgagagttagaggacagaattgacagtccctataaaaagccgttggtgctgtgctatttttaggtttcctagtgactcaacactgtgtgtggtgctgccttattttctgcactgaggatgagtaagtttgctttccaaagcttctggttactaaggagtcacactggggctcctgggcctgcagggagctaccctgcctgggcggggactcctggcactgcacttctgatgctccttttatcccttctggtccattcctccatctctcctccctgcatttcagattacataatagtcaccaacccccccccaccccccaccccccgaggcttgcatgtaagaaggaagctctagcctagccagaagcatacagccatacagcgaggactgggtgggtaagcatctttgtgtgggtttggcattgtaggctctacccagtacagaggcttaccctctgtgagtctctcttctcataccctttcctgccatctcagagagaccaaggcagaggcagacagagctctggggaatcccatgtggttcccagtgaacactgtcaggctttgaagtttgcaaatccctcacaacagcatgtctgaaggcacatgtgcaatttccttttgttgtgtgtttagccatgcatgttttctttacgctttgtcacaacatttattttgggaatcaatatgatgatgtccctacagggaaggctttgcagaggagactgtgacaaagcaaaacaagcactcaggaaagcactgcccccttgtagcaggcacactgggcaacaggcctgcctcttcccttcactgtatttttttttttaaataacttgtagggtttgatgttatcgttgtttttttgttgtttgcttgtttatttcagacagggcctcattatgtattcctagctggcctgaaactaagagtggtctgtttgcctcacacttcctgagttctgggaataaagacaggtgccaccatgcctggcacatgaactatgtgtttggttggttgattttctagggcttaatatggagcccagactggctttgtgcctcagcccaccgggtgccaactctgtagtcttgtcctaccacacacacctagcttccttaactgtgtgacccaaatgtccacgtattatcaataaactttgatagcatttcatgacaaggctggcccatgattttaggaaggattctcctgtgcatattggggaatttttatattttacaaaattttgtaagcatatctgggccaattttgtgtacaattagtattctattctttttggcaagattaatcatagacttggatcaaaaatgtgagaatgttggtgacattcttattttaaattaaatttaaatgatttctactctttaatttaaaaattatttttcaactttgccagataaaaaccaacaagaaatatttttagttatagttttatgtactttgaatatgtgtttttaattaactatttaaaattgtgtgtgtgtgcacatgtgcgtgtgtgtatgcacaaacatgtgcatgtggttataagtacatgggtggtggttgtggtagaggccagaatagggcattggatttccggaagctgaagttacatgctgggagctgccccatgtgggtgctgggaactctgctcctctgcaagagccacaagcacttttaacgactgagtgacctctccagtccctaataattgtcctttgtatttgcttttaaaattgttctaattctataaaaaaaaaagctcattgtaaagtactctaaactctagataccaaatgacttagagaaaagccaggtgtattcctctacaccttaaacacacacacacacacacacacacacacacacacacacacacacacacgcacacacacgcacacacacacacacacacgcgcgcacacacacacacacacacacacacacacgcatgcacaccaaaatgtgtttacaaatttgatatatatctttcagatatttttcatgattatagaaataaatatagttccactaaaatgtgactatattagatattttagaccaaatggaaataaaccataaatttttcaagagaagagctaggataggtgactgccgttgggcgtgggtttctcagataggacatgtcagaagcctgcagtgtttatgccttcgtttgaccgcctgcagaaagcatattcaggctttgctctcatgctgctctcggagtcagtgatggataatcattgagaccaacgtccatgcaaccgagcaagcaagtgcaagttgtccctcagcccagttctcctttatggacagcagcctgtcgttagcataatgtttgttttgtgctcctgcagacattttatcacatgaattgcaggttataaatattaacctattgatctttcccgcttctttgtctcctgtgagaatgtctgataaatgccatcatttcttcgttatataggtaaaggaaaaaacaaaaccaagaaggtaagtccccaggcaggtgacactccgtatgtttgtgaaatgatctacagcgtgagatgctctgaccacataaaaatccccatgcttttctcgagggttaaagttgacttgattcttaaatccaagctgctatgcccctcttctcagcttccttctcagcgctgtgatttttgacatacatcacaatgaacacattataaatggtcaaatatcaagctgaaacatacttgatttattccaccaaatcctctaccattcatttttacatcttagcagcaatttattgaagaagattctggaatcctttgatggaaatcaggcttttccttcatttagcagattatcacttaactaagagacaatcttattccaggttgtcactgaagaccagctttctgagtgatcacaacttgtagcaaccccaagaacaactgtctgccctatccctgctgagctgcagttcctatagatgtgtgttcatctgtccttatgttcctttgaactgcccattttgtttcttgaatgattacacatgctatggggaccatttatctttcaatttaggatgcaggtagatgtctgctttgcatgtgtcccgtggacccattcagggatgctgaagcatctcttagtattgatgaaaatgtattcatgttagaatttccatcctctcaagaagggaagtctggagtttggggatttagttttgtggcacagtgcctgcttagcaggagcctggccctgggtgtagtcccagcatggagaggtgatgatgtagaaaacagggaggaagggaatgagtgtcattccttctaaggcacagctgtgttgcccactcattgtgtaccttgacttaggaattactttcctattgccatttgttttgaatctgcttcgagtaatgagtagtccaatatcattaactcaagcagcttggctccatacatcatatgcatgttctttcaaacagctccttatgtgtatgtgccagttttaaaactattatgtgcagtgccacagtgcacatgcgtatattttatcactgcctttcgagggtatatttaaatcttacccgtaccccatctgtccatatcattgatgtgggcagactcggagcatctagctgtagataaaagatctcagatgagacaaggcagcagccccagaaacagtcttcactttgagctgtagaccagaagtcatctaccaaaccgaagagagcatctctcaacagagagaacaaacaaaatcagggtcgccacaactggacattcacaactctatagtgtgttccaaaactctgtggcacatgaagagcaaatatcaaagaaaaccagagacatcccactccatgatgagccaggtgttgaaatggacaaagaatgtaaatctgcctgcaaagtgtccccagtgggaaaacaaatttgttctcataagtgaagatcatagcagagaaagagagacagtgggaagcagccaagtggaaagtccagaaatgagaagtatagtttctaaaactcccccgtatgtgataaatctgtaaatgtaaactcttataccgcataagtactaatgagatagaaaggggcaggaccgttccatccatccgatagacctcactctctgcagcctcgaggaacatagttgagaaatataagtagatttacaagaaagtgtattaaattgtgccaccttatttactgactatgacagaaaatatttactagtttcagcaatcaagttatatttgtatctatgtacttaaaaaaagaacacattggccattataaatagacctgccttttcttacctgatccctacttttgtgttaacattttcctcaacaaaatcaattatttagttcattcttcggaaagatttttctatgatacacacccctaagcattcttcctataagatgtataatacattagtgtatcggtcaacgtttgattgatgtgtcagcctccatccactgtaccataagcacctgaggttccgcatgttaaatggctcttttatatgttcacccttcttgacattttcgatggcttatgtgacaaaaggaagaacagcagagggatggttcctctgtgaaccaccagggagaaagagggactaacttctttgtgtgtgtttatgataaaatggcagggttgtcttgggtatttggcacacttcttttatgcgttctggcaaaggaggtatttggtcctttgtcttaagtttgcaagtgtgagcagaatgaacatcaaaaaagggctccgggattcactgccagcggcggcttcctcttcctccccctcttcctcctcttcctcctcctcttcctcttcttcctcctcttcctcttcctcttcttcctcttccttattaaggatattaaatctcttcaaaatagaaagctgagcgaattcagaggtgcatatgaaaagcgcttctagcatgagagcagcctctgtaccttccgatgttgtcactgcaaactttattcttactggaatggccaaggacgacatttcagtgtgcactctatttcccaccagaggcctgttccattgcaagttttcctccagatctccatagtacagtcaggagagactgcagtagtggttcgtctgaacctactttactgtgtttgtagtacacatccataacccaccaaccttagtacccacactgcttgcttagagaagcctgtgaatgggccttctacttggaacttactgctttctgttgccgccagagggcagcatcttcacatagtttttgtgcacactcctgagagcagacaggaagctatttcactcatcctctgagcctgatccagtttaggtaaaccgaatgcatgccaactgagttgcattctctttgcttttgtttataaggaatgggttggataagagggagaagatgtatattacatgttaacatacatatttaaaacatttaatactttatgaaaatggttacattacttgtatttagtattcttttgtctgagaaagtaacacactcttctctctatcctggctgctgtattcaatacccttctaactcataaacctttctcatatatatggaatgcagagctgtgcctctcagcttactttcaagtaagttggcatcttgtttgttatctaggtttgtgttcctgtcagagtcctgggttgatagaatcagatccaatctgtgtgtagggcaaagatgcttccccaaatggcagattacttaaatgctgcagggtgggttggaatagcacaaagagggcagcttggtaaactgtgctgatttgaggcatgaggcagaaccgctcctcactcccatctttccagcttatcccctctgcacagaggtggggaacaaaagacctgagctgtgtctgtttcccggcatgcagtggccgctgggcaggctgatgtctgtccgtgggctttattggtgctacttgtgcccatttggggtttggcagctgtgctctcctaactctcctaaattagggactttgggtctcttgtcgcttttattcttttaagaactgattgtactatttttttattatgtgtacctgtgtgcatctgtatgtatgtgcacacacgagtgctggtggctgcggaggccagaggagtctgatcggcaggagatggagttataggcagatgtgagctatgtgacatggtgcttgcgatcattgtttttattgagataacttcacacaatgcagccattttaaagtaaattcattgtgctcacagtatagtataccaacaccctgatgccaaataattttagatttttaacttttcattttgatataattttttaactggggaaaacgataatagaaggggaaatctttcctagctgtcaaccagatggacccttgttgttcctgttggtattccattcactcattggttggtactgtctttgtgtgtctctatgtagacacatgccgttcacctctaccttggaacttttgcagacatagtgaggccccaggccatctgtcactgaagactgtggcttacacagtcccctacaagggcccatagcatggtactaaaaccccgaaaatctgtcaatacagtgttcctgtcctatccagccacagcctttataggctgtgctctcaggaccctcctaaccctgagggctgctttcctttaagtaggttgatcttgctgcatcctgatgagtgcagccctctcaagtttgcccactgcctgccttgctgatgtttcggctcctactgtgtcttaggctatcctctgttggtggaaatgagtcctgattttcagcattaccttagaaacttttacactatttaccttagaagtacttacactattcctttaagaacccattggatggcatttctagttttagaaactctgtagactaatttagaaactgtgtaaagctgctccgatcccaggggctgtagcgatggcagctttcatttccccaagagcacatagaggatatgatgcttaactttgtattcaagagtctgtaaccagagtattacggcacttccctaagcagaagggaaaggcccgccaggccgtgccctgggtaaagccactgtgcttgatgtgttgccaaggggtttgctgtgttcacgtcttggatgctgaatgggattttgtagtgtgaattgttgtgataactaggtctgtattcagtggtacacgaattcctgaggccactgactgggctctcatttttccaaggcaggatggatcactgtgttccccacagtctgacttcctcctttggggaagaacactgctactccctgagaagaagttcattatttcagttttgatatatggttaacgtctcatgactgctcactgtgttccaggtaacagcaggaacaggtccttgaagaagtagcgtggcccttccactcctctctcagacccctcacttggtgtctcttaaacatttacttcgtttgatctggcctgtttagtctgataacaagttttcatgaaaatgtttcaacatttattataaagctgaaatgcaaaagcaaaatgcaccataggcaaattaaaccacatggacaaaatacagttccattttttcctaccaaggaaattctctctggctttgactttataaggtaaggattgatgtgaaccttcaactaaaggtttaagctctgtggtgtagcaaaccacagtgaggtagtcagctgcccagggctttgtactaatgccgccttcccatcactgtgttagctgccatgtcttagtctccgttcgcctaggaaaacacctcctatttctttgtttgtgctgctttttaatgaattctggtcaggtatcatagaaactgttcttctgttgagtttgcttgatattttctcatgattagactcgagttaggtttttaaagagcatcgcagaggtaaagtgcccttctcatcacagcatggaaggatgcaagctatctcttgacttttaatgcagatcttatgttcttcccctgctccatacatagtttgtggtttgactgattttatttttaaagtgaaatactgtggacaggttacttggtcatctatgcttttaattatctatataaaatgggaaaattctgtgtcagaatatgaaatcagagcattcttcatctgctctgcgtccttttgcaaagtttaacctctacttgaaaagcatggatgtattactttgagaaatattgaaaaactcttggacaggatttaccaagtctcaagtgctcatctagaatctagtgtggtggctcttagtgaattctgaacagaactcctgcagttagcacgggggaaaggacatgatttttcagagttagtcaaggttctgtgggaagtagggatgggtgagagaggctgtctgatgataaggagttgcctcacaagggttatggggcttaagaaactcctcatgtggctcctaccagatggagacctggggcaatcagttgtgtagctcgaaggcctaggcactgagagctgagagtctgaaaccgaggaaacaggagcctgaagacagaaggcccacattggcagatgtagattttgattcccaccatgtttattgttctctttgagtctttgctgcactagatggtgcccacccatgttggggagggtcatctacttcacagacccaccaaggaattatacttagccagatgtgggaaatcatttggtctattcaagcttacaactgaaattaactgctgcattttgaatgtgcgccccccccccattgtaatggtattaagaagtgtgtccttgacaaaagctattcagccacacaggccccactgtcgtgaatgaattgagtgtgatcattagatgaagaggttagtttttcactggagtgggctactgatgcaaaggttccagtagggtctttctctgatggttcccacatgctctgttgccctccccccacaccaccctatgaggcagtcctcactagatgtgaaccctgtcagttgtgaacttccaagtctatggaatagtgggccaaattagcttttatcatttataatttatttagtcagtggtattctattacaagagcagaaaaaaaaaagatgaagacattagccgtcccattaaccatcctactggggtgagccctccagtttctgacttcacacccaaatggcactccctgcattgattttgagaggaggaaatttatttttgtccatggattgttctggaaattgattttaacccaatatatatgcacctgaaatagatgtaaactagatatggattgatatcttttcattctcttatgaacactcagcctcaatatatacattgaatattacacagaaatgaaattaaaagactggagcaacctacaaactctgttcagtgcatatccacccagcagctgagacaattactcattagcaatgcaccttggaaaactgtcatcacagtgatgtcctcagcacagtgacaagaacgaaataaaacacccagcaggggaaaacaaatatgggtaggctcttaaaaatgaagttaatatttagaaggtcacctttgtttatttcctaggatttaattctgcttatgattcctggcacactctcaaaattagtgtgccgtagcttgaatatcactaatcatgtatgcttcaaattggaaagaaaaattaatttgcaccgaagctggggaactatgggaacaagctctgctccgtgccacttcctgcgctctctgtgcttctgctgtttttcgttgctggtgtgtcgtgctcggtgaggggttggcagccaatgccagggagtcaggagctttggcaagctacatatgcgctgaagactttgagagaaagcagaaataaataaagtacgtttgtttgctttagtccacaatcttcctttgtttagagatggactatcaacgctcacagttgggcaggcgacctgtgattcattaagacttgcacttcaattccattgagaacactttttctcattttctatctggtttgaaacatgctaagtgtgtctgttgctgtgttggggtcgcatctccttacattctccctaagctgcgatggaagctctgtgccttctcatggggcgtgtctccctattgacttatcacagtcatttgaagtatactatagatattttttgaaaagccatgaaatatgttttctttctttagtcttccggctatgttttatattttgttccaagttcagtgacaagataataatcaattctgggttccaactactatttttattatctgcttctttctaggttttatgatccctggggaagattgttctgtgttatttgacatataccacggtgctctctggttttgtagtatcattgtccttttagtgattgctcccttcactgtgttgatatgttgctttaaactttgacatttaaaacatattaatctattgctagtcatgtgcctggttgtggaaacatacacctaggtacaggtgtctgcctcatttaggagaaggaatcaatccctggaaactggaattataggcaggtgagagctgtccatggtgggaagtgggatctgaccttgagtcctgtgcaagagcagcaagtactcttagccacccggcatctcgtctcatctctccagcccaacgtagatagttttacttattcaatccattgcatgttttttttttctatttataaaccttactcaacccttttccatttgcattgcctgagtgtttcaagatgtctgtgcttctaagtctggacgttgacttcttttttgggttagttttttggcagtgtcatttctatgaaagtcctttgtcattgaccagatggtcattaagtagtctcttcagaagtggccctcttttgtgatgttatcttggcagtcttaagaagtttttaataggaagccgaagtgaagggatagtgtctgagagactcaggggaacttgtccaagagaagagttgtaaaacggccattttgaaattaatttatgcagcctgttggactttccctggaagttattgctgatacacacccacacacccacaccccccacacacacacatacacccacacatgaacacacacacatacccagccatgaacacacacacatacacacacacacacacacacacagccatgaacacacacacacacatacacccacccccacccccacacacacatacacccacacatgaacacacacatacacacacataaacatacccagccatgaacacatacacacacacacacacacacacacacacagccatctctcctgtacacggtccctagaagctacctttcctctctgcttcgccattccaagtattactcagattgtatgtctaatctgtcacctgttgtcatcaacagtcattttcaagtatcacagtctaggtttcagtgaaaagtgggcacagttctcccttgagaggagagatgctgtctattcgagcgtgatcatgggccatttattgggttttgagttggtcaacaggaaagagtaaaagcaaagtgttgagaaatgtttgaaggtgactctgtttgggtctgtggcaggcaagtgggacaaagaggaggcaggactcactccaaggctgacaacaccttctgtgatctctcaccgtcctcaaccctggtgatctttcctgaaccaccttaaagcagtgtgagcaggggccagtctgtattgtgaggaggtgactccaggtgacaccttgctgtgaagcccacattcacacttcaggaggaacacttgctgactctgttctctaactctgctggtccacactctgcacagcccctttctctttcatccttgtttttcctgtccctgaaattgaatgtgctgattttctttccccttttttcctccccccacctcctgttccctttgtagtattgcctttctgtatgctcctcctactctgactttaggtctcactgtcccttgtggtggcattctgaacccatggaaaaacatgtttaaacttggactgtaccaagaaatgtgatttttatagtgaaaaactccaggattcagggatggtaatgggaggctattggtagaggcaaggctgcttgtgtgtactgtgtgagtgatttagggtgataatccagtgtctcaggtggatttgactatatagtgggacagctggtgccattttagccagatgctgacctctccctgcctgtaattaacaattttccagccatagatcataaagtgactgctgttcaatgactactatcaggtgctggtgtctggaatttcttaccctagggatccagtgggcacagcaaccttgactctctaggcaagagtgacatttaacacagtcgcttgatgctggattatgagagcgctgacattggtccccagacagttgctcaatacagatggccgatgagctctgaagcttcaggctgacatgtccagatgcccaggggtgaacctatccttttctttttagacacagtgtctttcccgagtatttagaaaataatcagaaaccatttcaatttgtttttcagctgcaacttaggggctcgagttttgatgattaaactggatggctaaatatatttccccaggttccaggcatcacacacagagatctatgcattgaagtaagcttgcctcctgtcatgagtatctcagtgaagtcagatcttttcatgacttctgtctatagcagtcttttttgtattttgagacagggtttctctgtgtagccccagttgtcctggaactcactctgtagaccacgctggccttgaactcagaaatctgcctgcctctgtctcccaagtgctaggattataaataggagtgtgccaccactgcctggctatctttgctccttttaaataacagaaaaaaaaatgtattggctgaaagcacatctagtaggggaatggattggagcctgggatggataactcatttgcctgagaagtatctatgagttgggggaaggtggcaagatacaagacaacagagctgtgagccctttgctgggatctcatgctctaagttaaggaattggctccgtccttccagcaaatccaggatgagaagtggagctctgtgtatatcatcttcctgtagctataagggtttatgtatgatacaaaccagctaacctatgtttcatgaaaagatatacaggtgagactatataggcttggaatggttgccactacagcagcctctcttagccctgttaaaagccactgacacaggccgttttaaatgatctttcaggcatagggttgtggggttccatgtggagctaatggaaggtaggggcattttaggaggaatatgtgttttctcaaagttttaaatgtaacaagctgatatcagaggaaggtcccccctccccccacacaccgtctttatcgttccaaggtagccgaggtgagatgctgccaaaagccttgaagaggtcagagaatatgggacaacggggcagtcacaactccttacagatgcatggctttagagatattaactcagaaatatcatcatgactcgttgagattttgaaatattgcttctctattccacttgaaataaattccacaattgtcgctatttataaccacaggcggatttcaaataacacactccaatggaaataaaaggagttttagacagtgagtctaaaacttgcttccttccatcagtagtcactgtgatgtggcctgtgaggtggtcactcagtccagcaggtggtgtaacactcacaagaagagctacagtcctcacatgcctaccgaagaggtcggggagcagggcaggacacccctgtcccccagtccaacgtcagagggtgtctctagaattaaaagaatatgttttaaattctgagctactgaagatgtgattcttggagacattttattaggcagattaagttataatacagaaatagcgttttttatttcatcgaggaggaaaggctggtgagatttgattactgcagcggaagcgtctgcttgtccttttcttgcttgcttttctcctcctcttctggtactggagtccctgctgctctctacccatcccctcccctctagcagaaagtcagtgtgctcagagcttgctgagatggggagcagggtgggttctgtggaatccccctggaacttcagtttgctggattgagcgtgaggcttttgtagacgtaccgagagcctcaagtatcccggtgggcttgctgcttttcttcctcagcatgtaggcgcttgcagtccactgactgcttggtgactggacatctgattgagttccagttctggtcatattgatgatgcttcaactaagggaagcccctgggccaccagcacagagactgatgcagggtggcttggtttactttgtattcatttagcagatgaaggctctgatagagggaaagaagcataagggagagtcttgatgttacggtgcctggacggagctgcaggagacagaggaacgaggacctgctgaaaggcctttttatccttcttatgttaagcaccaagggagtattttttggacattacaagttggttttgtttctgaaatatcttaagtggctcagaagagcacttcagtttgaaatgaccttttgtgggtagttttaaaatgaaaccacagacaatctctctccaacctcagcctttacaaaattctaaagatcaaggtttttcaaaggagaagagacccagagatgaaggtggcaagagaaaccatctagaatctacactgcaccaagagaatgctgttttctcctgacattgccctccctgtggccctagaaactccctgtgtgagaattatctacagaacggttcctggaggctcctgtcactccgactccaattactggctgatcatttgtgtcctctatgggttctatgtggtcgctatgttcttgagatggcaagtgattactcttgaatgtgtggtcactagctgtacttttactgaatggagcatagtccacagctctaaaggtacagctcggtcagcatcccctaccactttccttctagatctgctttttctctgctatagaggccaggatcattccccagctttgttgctgaattttagttttttatttagatctgatcttactcaggggaaggtgaggtatacatacactcgttaagctacagacactcactttgcaagttctcataaattgaagaggtagtagaagaaaagcaagacctggttttaggaataaacaaatggattatttgtagttagtgaattgaatcatctttcggcatctacatgcatatggaaatgggttccttatgccattgaaggaagggtacattttgttcaaccctaatcttttgaactattatccactgcctctcatcacttagatctctcaaatctttttatgcactcgaataagctctaatggactccgtgatacacagacatctacagtaaacacacagaaagcacccgggaaataactcagctgtcatttgtttgtgaaacttctttttttttgcgctttaattttatctataatttttatgtccctgtgtgtgtgtgtgtgtgtgtgtgtgtgtgtgtgtgtgtgtgtacatgagttcatatgcactacactcctgcaggcgatctcaggagccaggggagagtgtcccatcctctggaacatgaagctgccatgtgggtgctgggaactggaccctggtcctgtataagagcagtaagtgctcttagccattgagccatctctccagctctgttcctgatattattacctttggagtccaacgtttttgaagaattcagtctagcgacattgcttgtccctggtgctgctgatttgttgttgttgttttttgtttgtttgtttgtttgtttttcatggtatagcattagaagaatctgaagcagagaagaaactgactagtgcttaagctgcatcctagagtgactctttggagcagcatacttctgacaacttctgggctaggaatggagagaaacaggcttgcaatcatttggatcttgtcattagaaactatcctgcatgctcttgtgttatcgtcgagagcttgatcccaattgtgttaattttatgctggcatttttaatattcacacatggtcgctagagaatatgatggtggatgtctctctgatgacgagtaatttgggaaattctctgttccccaagtttagaaccatcaaaattcagagacctgagataaggcttcttaggatcaatgaaagatgaaatctgagtcccactatgtaaaaccagaacttagagaattttccccgtgagctgtgcatcatctctaagttgtagagttttgtaactttcatcaatcaaaactgtaactcatagactttacgacttgaactgtctttgtttcctaaagcacctttctcttgggatgcctcacaaatattaacaatgtatccaaaacatctggattaactcagtttaaatatttcagtggaagagtaaaacttttttccttcttaatgagtcagctgcttgtctttgccataagaaatcgtacttaaagattaattaattaattcttttaattaagaacaggaggagccagggaaagcctgctctcacagcccagctcttctcagggcatcgatgtgtttcctcttaggcaggttgaatttaggagccatagcctatcatcattttataaatgtaaatagagaagaaaaaaagggtggggggggggaagtgtggcatttcttctcaaagtctcattgaggcattttaaataaggcagttcaaggattatttaattctaatatatgactttactgtcagttgtccacggagcagccagccagcatgttagcaccaggatgtttgagcctgattgctagggaggctacatgcaaaggttgtagtgcttcttagaacattgtagctttccaggtaacctagcaacctggcagtcaagcttcttctgtaaccacagtaaacactttacagcgaccctccttaccgttcttccaaacacttcaatattacattccacaaatctttatacatgtttactgtttttatgagtcctgaatttaacttttagaaactttccctctgcatagcattaaactcttcaagtcacctagagtttccacttatggtgatttacatttgcaggctgccgcctggggctggttcttgtgctgtggttcacaggcaaatggaagaatgatcctcctttagcatgttcagacgtgtgtgtctgagactctgcatagggtagacgttatctcggggatggtgtggggagcgacattctgagctggtgcacctacttccagagttagggatgtgggcttgtgggcagcattggaaaagcgtttgtgttctcttgtcttctgtggaactcttttggggtggggggtgagacagagttcctctgtatagctctggctatcctggaactcactttgtagaccaggctggcctcgaactcagaaatctacctgcctctgcctcctgagtgctggaattaaaggcgtgtgccaccacgcctggcctgtggaactctttatcctttccatgtactgcctccccacagttcccacttgtttttccaaagagatgggcaccatgctggctgcagaggcccctgagactcattagttgagtcttcagaaggatttcttaaggaagatgttctgagacattcaattcagttccaacctccacacccctcacacactgattgctgtcttctcactcttctgtgactcccatttctatccctcccatctctctcccctctgcccctgcccctgtctcttacaaatgcctcacatggaatgctgtaaggatatttagctgaggtgtgtatttacttcattatttgaaggttttctgtagtaccttggtaagatcctctatatcaaaatgcatagcaacacatacgaaatttcttgtgtattttgatagtacactggttttatctggttaccaagccattttcctaggatagcataatttgaacatctatcactgatgtgcttggaagtgctttagaaaccagacgtttggggattttaggatacttgcatagattctagtcactgaccatacttaatcttcagtgtgatagaatccaaaattcaaaactcttcaagtgatgtgttgatgctccaaaattttctaatttcagattttggattgccagctctgggatacttgacttgtaattaaagtatcccatgaagcgacttaggtccctcattctgatctgaatgacttctctaagcacttactgcagtactttatgtaactgagcacctggacgttaggagaaatgtggctgagtctatacatgtgtcaaaacggagaaatgctactgagtcttctttgccagaaattcttataaatagaacaagttaccttccccatgggacagtggaaatttccatgcttgaatgagggactcaaagaaagtagactatatccaccatccttgaggaagttttgatttttttatcagttattgcctggtccttttggcagcatctggggatgatgtcatataatcaggcaggaggaccctttaggagaatgcttacaaggaccagggatccatgtgagcttaaacagtccctggaattggaacttgcaattccatgaaaaagcgaaattgacattgacattggaagtctaaatggttgcttgagattatgaaggattccaagctcaggttgaaggccaagatcaccccctcgggagcaatgctaagagcagcaaaggactgtgaggttgaagaattagtgttggcctactgctaccatttctctaaggccctcctggtgctctgtgcatctcctggtgagaggataaagccttcacagcagaccagtttaagaagtgagtagaagtttctaatcaggtgagctgccttatctaagattatcagctaatataaaggattccactggacccagggtactgctttgatgctgacactctgccgcttccttacctgtcctaggttagctgagaaagaccaccaggcctggaaggccaatgtcttaaaatctctgtaagtgccgaggtcatataaaccttggcatgcacaaggcccagaaaagggattctcctgacctgtctgggatccagttgtgtttttgttggttgtcccttgccttatttattctagcaatcatcgcccccccacccccacacacccaatgctgccgctagacccaccagagaggtcctgacatctttgccatgaagaatgagtacttgtgaatgagcaaggccagtggtgtgctctggcttctgtgcgaccgtgtgaggcatccacaggagtttcttccatcagtccttgactagaacatgtggactggatgaggaaaatgtgctcgtttgtagatggagaggtgtctaatacgttgagggctgcctgacaagagtgcactcacatgcgccctgagttcatttagaaaggattcgttggtggaggactgaagtatttctattaatattccttatctgagagaaacagaggcatctactggatgtcacaaaatgtaatatgaaaactgatctccaaagtcgtctttgttttccttcctcctcctatgttgaaacagaaaaattcagttatcctttatttgctgggtcatagcagagggaacggctcgccgttcaacattgaagtattattgcaaataaacacacatttgagcttctagcaccaaccaaccaccttttgatcttagtttgattgtattattcagtgatatttaaagtgcaaagtcgtaaagtaattcagacttcccaaacttgctatggtcataatgtttaattatgctttaagcttcaaatatgtaattaagtctatattttttaaattaagattttcattctttagtattttgagctgtggacaaaacagaatacctgtgatagtgtttgtactcattactcaaaactgagtatttgtattttctttttttaaaatattttttattacgtattttcctcaattacatttccaatgctatcccaaaaagtcccccataccctccccccccactcccctacccacccattcccattttttggccctggcattcccctgtactagggcatataaagtttgcatgtccaatgggcctctctttccagtgatggccgactaggccatcttttgagtatttcatggtaacgtaggaagaagagcaagatggctccggttgatattattcaatcctctggttttcttctcttacttcttcctatcaccagtgtgtattattctcctgcatgtttgcacacttggaaaaatgattgtggcagcattgagagaatttctcttgctaactgaattacacagtaacattatcaatttagagccattaaaatattttcaagtaaaatttccgtgagatttaattattgaaatgcccacttgtgagaggttgttttagaaaagaaaagtcagactctaagaaagcagctcttcttcccacccactcccctcatcccctcatcttgctctgggctacatggcagatcctctacacacattgcatgtgggtgtccatctggcaggtgcagcttgagtccacatacagagagccattgtgagccatggatgctcacagtagtatgtgaatgcatgcagatgctctctaatgtatctgtacataagttcccatcacgaattctgttcatttcacactcttccttcacatgtagcctctcctccttcccgccatcagactctcgcacaatcccttctttccttactgggattagacagtgaatggctccgtgcttactccgtccaccttttctaaattctttcctccaattaactgcagatgaatgcatggaaatgcatggccatgttttaggtccacacggtctctactgtaccaaagaaatatgaaaaacagtatcacttgttgcattctgtatttgagtttgctattactcttgatgatggaaaaacaatgttcacaacattttacaaagagagagctttgtttaaggtgctttaatgaacccagctgagtcaatcctgtctctcaggtctctgtaaagctttctttccccccaagtctcagcttccagtaaagttccttcctgtgcatcggagaactaagtccgtgggtgctcagacaagcatttgtagatttttaagactttctgtgaccccttctggcttgtactgcctcatttcaggtcaggatcttgaggctacattctattctgcctgggaacatgaacacaagagggtcaccagaacaacaaaagctttaaagtaaatagtagttcttaattccatttaatccttttgctaaggttggggccacttggtatctccgtggtatttacttaacatttccaacacttctcattcttttgggggatttattgcttctgttggtacttgttttaggtccttactccctgactgagggagactcatgcctctgtgtagctcggcagatttttatgggctaaaacaaaacagctggtcttgattctctgttagctagtgtttatttgctttcaatttattctttgacaattccttatatgtgtataactcaatctggtgacacccatctccccaccctcggctctcctgatctccctcaactaatccctaatattcccaacaagcccctctcccactatcatgtcagtttcttctgtaattgacaagttaaaccagggctgctggtgtgaaggtgagtctgatgctctcccctggaccatgtctaactcatcactgtccattctccctccttaagcagccatcagctgcctgtagctcttggagaatgattggacttgtcccagattagtgtctgttgccatgataaaatgccaagcaaaaccaatttggggaggaaaggatttacttcaccgtagaggtttacagttcaccttgggaaggagccagagtgggagctcgaggtagtaactgaagttgaaaccatggattggtgctcaaggtcatagccaatttcttttttcttgcacagctcattcccactggcctagggatggtttcgcctgtagtggaaccatcaatttgtaatcaagaaaatgccccacagataagctcataggttgacctgttggaggcagtcagtccttcagtggagactctgtctttccaggtaggtcaagctgactagacaccacagaccttataaactccttctccacccatgaccaactgtaggtgagcccagtcttgtttaagccttgtgtaggtaaccacagctatggtgagttcatgagtataacagctatctcatgctcacaaggcagaattttgaggcctttctcctgtaatgctagttttatagtgtggtatcacaagtgcaatctaaaaagttaatttaaaaactattctgaagttcaaactaaaactatggtaatgtctctggtcatttaatcacagctctgattggttccttctatagttgcttcaccatttgccttttaaaagtcaaggccataggggtggttccttgtattcagctgctcttaggttgaactaaattgggtggatattggtgactcagttgcttttctcttcatgcttatggaacctgtgcatgtataggttgtacagcactggagttgaaaaggcatatcaggaacatgtgagtttcccagcactgccaggccacccctggaggctggactaagattgttttgttgttgttgaagtgatatcccaggctggagccctgatcctatggttctgattaactggacaaactgagatgtgtggtacaaactgcaaggggaggctagctgaaagagtcagaacacagaaggttggtcccttcatgctctcttgtaccatactctggcaggtcagacatattgacaaatatcctggtgcagccaaagtcaagagaggatctgggattattcttatggcggtggtggtgatcctataaaggctttctccctctcccttcatctctctccttctatctctctgaaacaaagacattctatccacatatgctgactggaacactgcttacatctgtgccattttctgaccagaacatgtctttctggcatagttggattctgactcacagagaagttcttgagaaagactcaagcaggaaggagatgaatgaagatcaggttattggtcatgttctgctagggaatggatttgttttcttgttagaatgccatgtaacacctctagtcaaatataagtaaaagtcaatgcgccttcattaggaaaatatgaaccccaagaagtattatctatcttcccaaaactataaatcgttattaatatcctgctgaattcccccttaatgcatttaaaacagagttctgaaatatctatcttgatctacataataagcatataaagaatgttatggatacaatgcacatatggaagtaacatgtactactatagaagttgtacagaaataaagctaacatagatttacacctctgtctttgtcacatgtaataattactccttgaacacaatacaaaagataaaatgtccagaaatagatactcaactgtgtagctaactaatggttcctataaggtgtaagcttaacacataaactgtacgctgctgagttcaaatccaggttaatatgaatgtgggcaagatggtcaacctctctaccccagttatgacagtaactggcaaggcaaaggataaggggaccttcagtgatagtgaaggctgctagcagaattcctcctctcactgtagcatttccaggacagagtttttccagttaaatgactgggagtctgtgctatcattataataaacactgaacacttacagaagggccatggtgttgtccaaggggtgaaacactaggattttaactgttttggcttgagagaactatgggtttgttttgttgttgttgttgacccagtgtttataacaatggctggcaaatgctttctgtggaggccaggtgacaaatgtgtgggctttgtcagccatctgatggtttttattactaaccagccctagacaagtgagcatgattgagttccaaaaaatcttcattatagacatagaaattgaattccatgtaatttgaagaccacagattattctctgcctaattaaaaaaaaaaactatttaagcttatacggaagaaagaaagaaagaaagaaagaaagaaagaaagaaagaaagaaactagatgaacatctgcagaaaaaaaaaaaaaaaggacccagttaggcacctgggcctgtttccgcccccgcccccgccccaccccaccccaccccagcttggatcagtgctcaccatccattaatgtggtaagaatgtttcagcatctgctcccacaatgacgttcctgctgttggctccatccaagcctttctgccatgataaacaaggcctggaaggatgtcttggtatagagagcagctggagcaggctgagttcctgggttcccccggcaggttttgtttctcatgccaatggcttctctgtgccagaacctgctcacacagatggagaaaagtgcgggcagaaaaggggtcggtgattgttacacattggtgtatcctttgttggatgcttggcctctgcatttcctgtagatgagggagaggagcatgactgatggcaatgcttactccagccctaggtttgaagtgataatgggtgattataaaggggaataggacaaaaaggagttgggaaatgaagacagctgagagacagggatggtacccaagtgcacggtgctctttggattgttcatagtcccgtatgtgctcagccgagtagagaaaaatgtgagtatctttataaaacctgacagccattgccttattcataaaggctttaacagaaacctttagccaaacttcattttaaaggaaatttattcccaaggcattttaattgagtttttatggtaattctgtgtattgtctattgaatcaacatcccaaataaaaccatgttttgtttatccttttattctgtgagtctctactctgtatcttcaagataatgacctgagtcaactcagagtttcatgaattgtatgtataatagaacaaggcctttcttggtgtcttacaacttatttaaagcaatattttcacctgaagtttatttttaggttttgttttgttttgttttttgtttttgtttgttttttgtttgtttttgttttttgagacagggtttctctgtgtagtcatggctgtcctggaactcactttgtagaccaggctggactcaggaatccgcctgcctctgcctcctgagtgctgagattaaaggcgtgtgccaccatgcccggcttgaagtttctttttaaatgcagactttaaatgtttatttattgatttgagtatagtatgtgcacatgtgtgaatacacatgtggaacatgtggaaagtcacaggagttcttttattctaccatgtggatccctgggatggaactccagtcatcatgcttagagggaagcatcgtcacccactgagccaagtcattggccccaaatatggaatttttgatgaaggattctatttttaaagattttttaaaaattttttatcatgtatatatgtatggaggtggatctatgcacatgaaggcgggcgttgtctgaggagtctaacagaggccatgcgatcccctagagctagaggtttatgtggcagtgaactgcctgatgtgggtgcagggaactgaactcgagtcctttgcaagagcactatgtgttcttaaccaggaaccatttccccagctccctggtaaacttgtcttgtacacgtggtcacaatatgtaaattgtgtataagtgcatatgtgtgtacatgtatatgtaggccagatttcctttgttctatagagatgtgcttataagttctttcttgcttcctactttctgaacttagcaccttcttgaacttcattcccagggaggaagttccctaactgacagtggcgattggagacaatccatagttcagctgaactagattcctcatccaacaatttcatttgaaactatcaaggagatgcggagctggggttcaggccaggacttggcttgtgggtgaggagacttagagcagtctgcagaggaccagggattccaggcgcacagggaaggaactgcagccgagagcagaggtagatggggctgctatgagggagaaatgcgggggcctggattctcagctccatcctctgggcttttgtcctgagcattttttgtgagttactcaatcaaattttaatgatgaggaactgggttctcatgaattattcctaggccagatttcctttgttctgtagaagtgtgcttagatttcaaaacatcattgttagatttctctgattaagtcctttcttgcttcctactttctgaagctcttttgaacttaagttagaaacaaaacaagacaagaaatttctccagtgttcacatttagcaactgtggctttggagaagattctagtcctgacccttatccagaagtaagagtagcatccttctctttcctcttgtctctttggggacttggaggcttatctgaaatcctgaattcagcgcgtaatgtggcgctggccactaccattactccctccaggtcagtcatggttccgttctcatcatgtttgctgtcttccactgaaagataaggcagactgccttctctattatcctatggtgtttttgtttgtttagccatgctgacccgagagtccttcaggttggcctcaaactttcaggaacctctagctgccattacagtcttgagctgtgtcttagtcagggtttctattcctgcacaaacatcatgaccaagaagcaagttggggaggaaagggtttattcagcttacacttccatcaccaaaggaagtcaggactggaactcaagcaggtcagaaagcaggagctgatgcagaggccatggagggatgttctttactggcttgcttccccctggcttgctcagcctgctctcttatagaacccaagactaccagcccagagatggtcccacccacaaggggcctttcccccttgatcactaattgaggaaatgccttacagttggatctcatggaggcatttcctcaactgaagctcctttctctgtgataactccagctgtgtcaagttgacacaaacctatccagtacaagctaccaccagcaaaactataggttcttattgcatttaatggagggagactaagactagaattagaaatcccccaatgctactttttggaaatgctgacctatgtgggacattgtgaggtcgaatgttttcaagagcctcattatacaaatgagtgaaagcaacagagaaagttgtgagctctgctaactctgagtatgtgttctgccttgcctagagcagcagcctttgctgtaaaagttgctgcctattcaagtacctggtacagggcatggagcttccaactgcaacagggcatcggcaagaacagagttccatagctccctgcatttggttatggcggctgattgtaaatgaattcagttcttctgcaatttatgtttcagttgtgaattaagaggcacttttcaacgtgcatgttgctgagtttcatttcagtacacctgcacaattggaaacttttgagaatgtgtgtgtgtgtgtgtgtgtgtgtgtgtgtgtgttttagtgctataaagagacatcgtgactatggcaactctcataaaggaaaatatttcattgtggctggctcacagtttcagaggtttagtctattaccatcatggcatccagtgtatcaggcatcaaatccaaccagaaagcggttggttattcccacaactgtcctacaaactgttacacctgtgaacataactctccaggcaggtcaggattataaagtgtaaggtgcagtagtgattaagatgacgtcttttctccgagcactttgtagcagaagtagtttcctggtcaacccaagattgttttctctatgtctctcatccgaagtgagtgctgtcttcagaaacagggctatggagagtcaccaagagcagtgacaatagcctgtgttgttttgggtgcccctggagcctctctgaccaataacttgtatcctatgcctggctgtgagattttcagttaataatccctgttttctggaatcagcatggttcacccgtgtcgggtagtttttttcatactacttcaaaataaaatattttaaattagcatatacactaattgccataaaatttccttatatatcgttatccttggttcacctactccatacattttcttttccccagtccctatatctccacttatagcttcatgagcctgtcttcctttcatgtcaccagtagccagtctaccagttactttatgtttcctcaggttgggagatcataggtttccacatagcttcatttttaaacagttcttgagctccgccccatcccatggaaccataaacagcaggccttaccccagcctcagggaggttctgacttccttccagtttgggaatcactggtttggaaaagtggttctcagtgtctttggggcatcataatcatgcatgggattcaagactctaattgcttggcttccagttagtttctcactaatgtggggtatagaggcactctgggattttaacagctccctagtgaatttcccactgtattccaggcaatgttctagccatagagagcttgatgaaatatcatacactcagttctgctgggtgaggaggtgaagagaggggcatattgctcccagctctacgtgaacctcctttcccctggagaacatgcccttctactgcctgattaaacaatgtttataaatagggcattttctatgctaaatgaatattcactcaatgtgatttgttttaaaggttgcttataatgctatatttgttgaacaaatgtagacactcatatagttcaaatattaactcctaaatcctccaaggttttccccgtgatataccatctggcaagcattattgtaatcatctctttattatccacactaatgaaggactagcatagcattggtaattgaaaaacagggatcgtttaaaaatcattcaggctattaccagctctgcttccccaaccaggaagcacccaggagtagaaaatattgaccgatgatcacttcccatcaaggtgacaatgcatgctctttctgcaagaaataggataaataagaggcttctatgttgtaatccccctttctgaataaatgcattgttaaatgcacagcctaaacacacagcaggtgaacagtagcgtgtgtattgatgttgaacgcatggattaaatgtggtgcagtgtatgttgtatggaatttaggattttgggagacctagttctccatcttctgacactgtctgtgtaactggagatgagctaacgtgtgtccccataaccaacagcaggtatatcacccgagaatttattagagatccaagtttttgactcagacagtgctagcaaattgcggtctggcagtgagtctagcagatggttcttcagtaagccccttgggagatcctaaggcctcctagccccaggcctaggtccatgctaatgttatttgctccgactcttactggtcagagtacactgctcctcaaatttagactctggtgttttgagaaagaaagcacccattctgttccccatcccctgggagctgagtgctgtctgctgtgaatcacagagcactacttccttgggagctaacaaatgacatctcagaagaatgtacagaggtgcacaggcttcgcagtaaaacaaggggaaatttcaggctattcatcaaaaccttgcaccttctcttcaagacaggtggaagaaataacatgcagcaagcaaagaaaataaatctgtccagggagcatctcatcaatgaagaaggagtggtccagttcttagtcttgctgagatctcagcataggtgttattcttgtgacaatacagaaaactctcaaatatataggcctgtagttctatttcttttcttatcaaaaatctatggaggtaaaatgatttcacccactattaaagaacagaagctaaaatatcatttcaggagactgggatcatgatacttggaaccagacagaagagttcacccacctacaaaataggatattcatcatctgaagtgcagtgatgtttcctaattagaacaattcattgaacaatcaaaagcaattttctaattggcttctgtgtatcgagagcctatttgttggagaccagtaggccacagagaatgtggtctgttacaggatctggtagggatgaagaagttaggacttctgctagtaaataggctgcatcacaagtgaattttgtctggggggaataatgtgcacagagaagagctgacagtgaggaaccagcgctggaaatgtctgtgaaatttgcagcaatgttagatcgatcagcatcagcatcacgtcaacaaattctaaaaaccctaaggctctagtacacattggctctgaaactgacaagctgcacaaactgtcagtgcctcagtttccttttttcacgaggtgataatttcctcatggacctggtgatggtttcctgagaataaagaggacactgcatttgtaggacactttgccacatctgcagcatgataagagattttattatataccaactggctacatggtaccttaaaggaatccaaacagccattacagtcagctttcagcatccatgggttctgtgtctatcaaccacagatttaaaatacttacaagaagttccttctgtactgaacatagatagagctttttgctttcatcattctctaataatacaatataacatcatttcatatcattgacatattagataatacaagaagtctagaggttattgaagtatgcagagaattgcttctctctctctctctctctctctctctctctctctctctctctctctcctctctcccttattctccctctctgcatccctctctgtctcccttcattcctttctcccctctttctctttctttcattataaggaccctttgaataccagtactatactgtacttagtgagcagattatatggccaagaaaaaactattgatagaagaaaactttaagggtcctagtgtaaaattcaagcaaaagtgatgactcttgggttatagagggtttctcctcgccaacttccttcacgatactttttgtgagttgttagaattagattgagaattcatagaagttttgtttcattttgttttgctttttcagttgagtgccttttctttagtactggggattgtacccagggtctcatggatgctaggcaagagttctgccacttgggtatagtcttagccctctataaatttttatttttcagacaggtcctctctaagttgttcaagatggctttgaattgcttctatagcccagacaaaccttaaacttgatatcatcttgcctctgctaccagagtagctgagagtacataaacaggcacagcttggtttccttttcatttattgttggaatagatgaataagctaatactagaaattggtttgaagtgagtattccattgtgctctcttttgtagcactcggtcttgttggctaggccctgccacttggtggcccagacttttgtgaagtaaacttttagtccaaatggcagcagtgtgacagtaaatatgttcagctttcaaactgtgaaagggaaaatgtagaaacgtaaggtggttgaggtatagtgtccaaaaatgttgccaagtcttggccaaatccatgctctaaggtcctgtgctggcatgtgaaggcatctagccacagtttcttatgagccacaggaggacagcagtgacagtggcttaatggggatgtggtgaattttaatgctcacaaagtacaagggagcaacagctccttaacttagtaaggaacaatccttgtaccatcatctgggctcaggaaaaccagattcatcaaaataacaagtgtgtctgcatggggcaagctttagtctttttttttttcttctaaataattaaacttagcgaaatctccattgggttatttcatgtattttaattttctattttcagttgggtatgattggaaactctcacttaagtaaataccaaattaagagtaaagtggggttggaaggatggctcagtggttgagtccatgtaatgctcattccatagcaagtgttcagttcccaacactatagagaagcggctcataaccagctgcagtgcctcctttgggcattccaatgcatctaccttccggcattccaatgcatttgggcattccagtgcatttggtccttggaagtcacctgcactcacaggtacacaaacctgcaaatggatgtaaacacacttaattaaaaaaaaaaaaaaaaaaagactgagctgtactgtgcttgaaatgccaaatgattttttattatattaattccatgagctaggtacatctttctcatcagtaattgatcctcagcgttttaaaagctctccagtgttttatggcatgaatcagggtggaatgtcataacaacatccaaaccattgggttaacacagatcactggatacacatagtgaactaggtgttttgaaacgagaactctgggctacagacagaactactctgcctggatttttgataatctaaattagttcttaagtaaaatttgagatcatcctgggaatgacaagtgacatgaacttttattcagatgaacacgttattcaaatgtgggtaattgtaggtggtttgaaccgggaagcagtgagtaaaaaggccttctgattctaaagttagaaagaatcactattgatcaaatttccctagaaaaagagactaaagctttttattagaaagtatttagaggtacaataaaaataattgtttcatgcaaattatgtaaattttaaggtcttaaaatgccatttaagggggcaaaaaaatgccatcatatttgattatttgaagtctgactttaatgtttcttttatttttgaaacttctttattgaagtagattcttttctcatacaatatatcttgattacattttccttctcctttgactcttcccagtccttccctacttcctcttccactccagatcgagtccccttctttcattagaaaagaaaggcttctaagaggtaacaaccggacatgacaaaagtaaaatatagtaagatgaagcaaacagtatcatattaaagttgaacataggggggaacgagtcccaagaacaggcacaagtatactatagcttaatatttttctgtatctcttcccatctgttgccagaggaagcctctctgatgatgaatggataaggcactgatctatgagggtagcagaatatcattaagaatcattttattgatttttatttgtgtatttaattatttttaggcaagtagtatttggttttaccttaggtctctgtgctacctagtctctggttcttggttgtccaagcagtgtcaagtgttggttcttcttgtggattggaccttgggtcaaatcagacattgcctggctgtggggaattccatgctggtctccagttgagctaaggtctgaacccctgtggtgataattcaccttcatgacatggtaggcgttcccttatgctcctggaactctggctcctgcctaagtaaccgcccccccacccccccagcccccagaagagaagcatggtcagtagtcacataagcaatggcccaagcttctgaccttcaggctaaactcctccccagttacctagcaacagtaaagaccataaaaaggactgtttagcccacctcactctcttactcgtctctctcttacttgtctccctctcaaccctcactctcaccctctctcccctctctttgtcttctctcctctctcctctctctttgtcttctcctctcctctcttctctctcttactctctttctctctagcctttcctttctctctctgtctctctgtctctctgtctctcttttctaccttctctctttccccctgcatttctataataaagctcttaaaccatagaaagtctctgctcatcaaggctgtgcgcactccagcaggtgttgggaacctcttccctcatccctccctcctataaccctggtagctttagcaaagtagctccggggttgttagatagggctgcccatggccaccccctgaagagtgggatagaggagtgcccacccagggatgagtggaaggtagttagcagccctcccacgcctgactgaccagcgaatacgtggaactctggcggggtgtgggtctcttcccctcccctctttccccaaggcccccgtttttagttcccacacctggctactcttacaagttctatgcaaattttctacattggcattgtgtgattttttacatgcaacatgatgtttggaagtagttgtggaatgttacatctagtgacttctaatattgttataatttatatggtggaatagggtacccattgtcataattcttattcaacatagtattggagatatcaaccagaataattagggcaagagaaagaaatattggaaaagaacaagtcaaattgttcctgtttgaagatgacactatccaccatctatgttagaaaactctaatgacaaaaacaaacaccaacccaaacctgctaatactaagtgaattcagcaagttgaacgttataaagtcagtatacaagaatcagcatttctgtacagcaagaacaaattgtgtttaacaatcattttttctttctttgttcttttctttaagtataaaataatgaagatcacaatttctttgaatcccttcatcattaagatttatgtggtctcggctggttttggtgactggtggaggaaagtcaatcatttgggcttcatgttctcttaggcataactatattaagccatcactatgctgtgtgtgataactcatgctagttgctcttcttgagggcaggcagatgttaggatcctgtccatatctacatgattcccactgcctgtacttagaaacctgtctaaccctggacagttcacaagccacccaagagggctgatcgtacctcacctcacatttaaggtgaagatgcccataggttgtggcttctcaaggttagcttctgtcataaatgacagaattgtggcttcaccccacagcttctctcccaagtgccaattgcttcacttcagtatagcccccacatacatttaaaacgcgttatgttctttttcttaatgtgttacttgtctaatcttacatttgatctccaactgggtcacccaatcccatctataaaagctcttctgtctgaacctgaattgctgggggaattcccacccatctacactggtacagaggcaggctatgccagcttctttgaaattcccatccatatagattggtacataggcaggcaaagtcagcatctttgattacttgtcatttacctcatgttgcttccatcttgaggggagatctcagttagtttgtggttgatgacatcttctggagcattaatggtgaccacattttcttttactcctcacagaatcacgtcaatcctgccatggacttcacacagacccctcctgggatgctggctctggacaacatgctgtatttcgctaagcaccaccaggatgcatacatccgggtaagcatgctggcttctctcagatactgccagtgtcgtatggaattctgttttccaacctacgcacagtaggagattgctattagatgagtcaccccagtattttccttttatcagtggtaaactaaagacatgaaattgatcaaggggctaaaataagaatgcctcattttacattttttacacatactttaacaatattactgaacaatgttttctatagtttcatattggcatatgaggaaaaactcttaagtagtaaaatacagaaatgaactatatactcaaatcctggaaaatctcaaaacctgcaagacttcttccatggttggaaagaggccaaggttccttactgctacattgcttcattttagtctaatgtttagagacacaataaaataatcacaaatacagagaaaaacaggagatttgtggagtgaaatctttctatgtttcataacagaccactacataaggttgttagtggaaggaagaaggaagtggagacctctgtgtttctagcagatgccacctggtgcctgggcagtgccctgtagagaatacaatgagtgccataaaagcttatctgggttgcccatcagagccctgtgattgcaccatgtccttgtcttcaagatggagagctcagatgtcattacgatagaatggatgcaagattgaaatcaacgagggatttgaattgagtgggagttagactgaagttacagtgatgactagcccaaaggttagaaagagtttgaaggacaaattgctcaaagtaagaaaagttgagcggatctgacaatggggcatgtgtactgggacatgtgctgccagaccctgattaacattggtgtcctgaagatgaggcttggcactgttagtagttagtgatttaaatgtgggtgattccattgtcccggctaaagtgtcttttgttaaacaagggagacttgggggctctcagccatgatggtgctttcttggcaagtctttggaaatggacaatgctatgcccacaagaggaccttgggtatatttgggtagtctgcagtgagaaattgtaccatctcatggtgacttctttgtacaaagctatgttggacttcctattttctgtaggcctcatgttttacatgtatgttattttattttatttttttattaggtatttatttcatttacatttccaatgctatcccaaaagtcccccacatgctcccccacccactcctacttcttggccctggtgttcccctgtactgaggcagataaagtttgcacgaccaatgggcctctctttccagtgatggccgactaggccattttctgatacatatgcagctagagacacgacctctggggagtactgggtagttcatattgttgttccacctataggattgcagatccctttagctccttggttactttctctagctcctccattgggggccctgtgatccatccaatagctgactgtgagcatccacttctgtgtttgctaggccccggcatagtctcacaagagacagctatatctgggtcctttcagcaaaatcttgctagtgtatgcaatggtgtcagtgtttggaagctgattatgggatggattctcagatatcgcagtccgtagatggtccatcctttcgtctcagctccaaactgtgtctctgtaactccttccatggatgttttgtccctatttctaagaagggtcaaagtgtccccactttggtcttcgttcttcttgagtttcatgtgtttagcaaattatatcttttatcttgggtattctaagtttctgggctaatatccacttatcagtgagtacatattgtgtgagttcctttgtgattgggttacctcactcaggatgatgccctccagatccatccatttgcctaggaatttcataaattcattcttattaataactgagtagtactccattgtgtaaatgtaccacattttctgtatccattcctctgttgaggggcatttgggttctttccagcttctggctattataaataaggctgctatgaacatagtagagcatgtgtccttcttaccggttggaacatctggatatatgcccaggaaaggtactgcaggatcctccagtagtactatgttcaattttctgaggaactgccagactgatttccagagtggttgtacaagcttgcaatcccaccaacaatggaggagtgttcctctttctccacatcctcgccagcatctgctgtcacctgaatttttgatcttagccattctgactggtgtggggttgttttgatttgcatttccctgatgattaaggatgttgaacatttttttcaggtgcttctctgccattcgatattcctcaggtgagaattctttgttcagctctgagccccatttttaatggggttatttgatttttctggagtccaccttcttgagttctttatatatattggatattagtccccaatttgatttaggataggtaaacattcattcccaatctgttggtggcctttttgtcttattgatggtgtcttttgccttgcagaagctttgcaactttatgaggtcccatttgtcaattctcgatcttacagcataagccattgctgttctattcaggaaaatttcccctgtacccatatctttgaggcttttttctactttttcctatgtcagcactttgagaagttttcaactattatctgtaatttgagtatataaaggattttatggtcatttccctgaaaggtgtgcagtctagtacttggtgagaagtgcagtctgtcttaagataattgttttcctatacaattttgatcagaagcccaggcatagtgactataatatgcctttaatcccagatctggggcggcaggagcaggttgatctctgtgagtttgaggttagctgcactgtctcaaaaacaaaaaacaacaagaaatcaataaacaaaacagtccctgtaaaaccctttaatttcatacaaacacacacacacacacacacacacacacacacacacacacacacacgcaaacatacatgcacacacgcacacgcacatgttcactgcactcgcattttctgtgcatgtagtctgttttcatcacaggaaaactagtatttagggagatcatacaatatctagccttggagacttgactgtgaaaagtggaagccgtgtggaaattggatttcacatcagctggttgatggttgcagataaatgctctaagattagagcttgctgatgccaaatgtattgttaattgcttaagaagcatatgtcttatgaaaagtaatttaatgtcttaagcttgatttctcagtgcattttctaaactgcgataagtgaaattaataccatggcaacctgaattaaccttatacttaacagagatgaagaaaacctaggtacaaagccaggctggtcccttttgttctcctggatgtttctttatgggttgagatagatgcatgtggctcatacactgttatatcttctcataagagtctctctaccatgttttctaggtcacatgtgtctttggggccttgactactagatgcaaggccaaagctacctctgtaaatgccacttccctgtgtaaaatttagggttttgtaccagtgggattctggtgaccttgaaggtagacacaatggttgtagagctcatgtgttctacagtactgagtgatacccgtcagctggcttcgtttggtctgtgacctgggaggtctcttccaaaacactaagaggaatttatttttaaataatatttttttaattccttaagaagcccacacattgtatcttgatcgtattcactcgttcctacaactcttcctccctgcatgtccctatccactcaatcttttgttcttgtctctccattcagtccagttgctgttggccaagtcctcttgggagtaagctctgcctggtagtttgagatatatccagtatgtatgtcacacacacacacacacacacacacacacacacacacacacacacactattccctttgctcttgacactgctgtatcttcatgcttccttgatcactttgttttcaggtccctctatgtccctgcctttggtttagcaaacttgggcacgtatgcttgtgtctatcagttttccgaccttcctcacctttgcccttctgttgacccttggcattaatttttgctctgaagctgtttggtctgcttcttaggattgttgctgagcctctctgggcatttcttttcctctttctgcctatgaaatgaacataacatgcagtgctcttactgttaacctttgcagacttcatctgttttctgagtaactattgatacccacagtgagccaagtgttggccactcctcggggaacagtgggttctgacatcgaggaatttcctgtctaggatcgatgggggaggaacacatggtgtggagattaagagacagtgccaggcaatttttaagtcacttggaatgtatattagtatgagaagtccccaacatagatgtgggctctggacgagaagaacctcctggagaaagtggtcagccttagtgatctattgctgtgaagagataccatgactaaggcattcaattggggtgcttgtttatagtttcagagggttagtccatgatcttcatagcgggaagcagacagacagtgcagaaacagtagctgagaactttatctcctaatctgtgtgtaggagggagagagagagagagagagagagagagagagagagagagagagagagagagagaaacagagagaaacagagagaaacagagagaaacagagagaaacagagagaaacagagacagagactggggttggtgtatgcttctgaaacctcaaagtctattctcaaggacaaacctcctccaacaagaccacatctcctagtccttcctaaatagttccattaactgagaaccaaacattgaaatatactagcctataggggccattcttattcagaccactctatggtattaactaggtattttagttactttacatgtttctgtgataaaataccttgaaaaaggcaattcgatgcagaaagagtttaattcagttcacaattccattgaatacagtccattatgacaaggaagtcatggagatagaaacctgaggcaacaggttacattgctgtagccaataaataggcaatatatgttggtaatcagctagcatcttccattttagccagtgtatgacccaagcctagggaatagtgctgcccacttctcgggtatgtatccttcctcaattatcatagtcaagataaacccgcccaaacatgctattgtaattgaacattctgtcaagttgaaagcattaaccctcttaacaggtgaagggaagaccaaggtgagcatgccaagtaaaggggaaatgagcttgaggtgtgatggtgtgtgttttgattgggaagccagcaaactctaatatgggagtagcaaagttgggacaggtcatttgagatatttaaagctatcttaaggtgctttttgaattcaaacatcatttttcagtagctataacaatttctaaacaataaacctaccattttcctaagtgagttaagcaaagataataattttagaaaaaaaaacaaaaaacaaaaaacaaaccatgctcttgctagaaaagccacatgagaaatatagatgggaggcttagccaagaaagcaatactggacaggaggagataaggctatagctgtggtgtggaaagagagcataggaatttgagaaattgtagagaattgatgttaacttgaccaagagttggggtctggcaatgaggagaagcagtttggttggactaaagtaaatttggctagccaaggaagagagagacttctgacttgagagccctagcaagtctctttggccatttgaagccatgtcccccttccttttctgctctgtgtctttgtgccatctgcttgagtctctctatgagacagtcagtgaacttgaggagcacagatgacgctacagggcgtggcctcttcccaagcctgtgtatctgtatggcccctcaggtcccctctgccacctctgtggctttctctatcactacccatccctttgtctctgtcatgtgcactccaaccaaaccctttgtcccaacaaaataatggcaggccacatgtgagcaaaggcagttccccactgaggacttgtgacacctttatgtttgaatgtttcataccatccacctgatggacagctcctaaggcaaagatcatctttaaaaagaaactcctgtccctttccctggaggatattattgacattggacacttaaagcgaatgctgtgaccttttatagctttaaatgtatttacccgtgtattgtgtctcctgtgcttgactgaaataaactgtgtgagtagacaccaaagttcactcagcttctcaacacttagcccagtgtctagtgcctaataacttcaaataatttccttttaagtaagcaaataaaaaatagtgtatgaaatggattccattttgttttcttttgtttttgtcctgttgtttgattttgggtttttgacagatactgagagaacatgaagttgagtgattagggcgatggggagtatctgggaggacttgcggaagggaaataataggatgaaatgatattgtatgaaatacatatatttttttgttttgtcttttgtttgtttttgtttttgattttgattttggagacagggtctctttatgtaacctgattgtcctagaatttgctctgtagaccagggtggcctccaactcacagagatctgcctgcctgtaccttcagagtgctgggatccaaggcatatatcaccactgcctggctctgaaaaaaattttttttcaaagcaaaaaaagaacagaattttctcagctttatttttttctcctcaatggaaattcatggccttcatgcttacaacacttctaaggatattgtttgccacatgaatttcttgatgggtagctatgtttcttatgtaatacttaaagtgtagcaactgtgttctagtgaaaaccgttgatgtaattgaattaccccacagttggatagggacaaaacccaaggaggaattacagatctaagcattgcacagtgtacagagagaaatcactatgtgatttcagatatgaatctttcatcatattatccaatatttggccaacaccaaatgattttatttctaggactaagagagcctggtaaaggtgtcagagcagatcattcttaattgaccttttgttttcagagtagtaacatgaatgaaaagtaacagcaatccagatagtcagaacctattgtgagttattagaccaacccttatgaaagccagataagcttaaatgtgcaacaataaaagccaaatgcatgcaaaggagattcttctgtgattgtatattgacttagaatacaaaagataagagggagaaagcttatgtatgcccttagatgcttaaaggaaaaagttgaagaaattcccttaagagttataatcattcattcattgactcattcaaaaatgttatcagacacccagcaggcgtgataccatgcacagtggatgtggcagtaagggaagaagctaagatttggctcttgtatagaaggaataatctctctctctctctctctctctctctctctctctctctcacacacacacacacacacacacacacacacacaccacaagtaaggagcagtagtaattactttctatttgtgaagttccttgtttcccatgggacttttagatgttcactataaggggaaactaataaaagctctgcttgataacttgtgaagttttctacaattttatgaagtatatattgtttagctatatgagaatcactcaggacttccttcctcctgtgacctgactttaaacaacatcctggcttcatggagaaacctggtggtagttggtcaatgtggagtagagcagacccggcctttgctcagttgctgttcatgtggggctgtatcataaatataggtgttcctaatgaagctgttacctcattgatatacagactctaaccaacaaagctgtaactcaacagaatttataagatctggagttccaggaacaaaatataaaggtagacctggcaatggttagttctttatataacctgcaatccatttttttatggaggtataattggtatacaaaaacaatttgcaagatcgtgtaattcttgcaattacaatttcgtgtaattcttgcttcatcatccctcctaatttatgactagcattttatccactgtatatcatgggctactgtctgactatagtagaagataatgaatttcctgatgagataaaaaagagatgctttttagaaatacaattaattataatagtgttacacaactgtaggccaggaaatatgtttctaattgtataccaaatcagaacaaaatatattgatagtttgtcaataagaaattatgagagaagatggatattccacctaagaatggatttctccattctttagagtcatttttttctagagatgaaaactgtaaagtctatctttactgtttaaacatctctaagtgggtgttcctatacacctactgaacagtgtgctttaaacctcttgacagagctagagtcagtgacaaatccctgctccctttgcacttgtgactttgatgcagtcggtccttcaagggtggtctcagtcatgtgacaatgtctcaaaaatcatcaatgaaataagtaagggagagaagaagaaacaaaacagagcaatgggagagaccggttaggtcctgacctggggctgctgagacagaatcccgagggagctctcctggatgcccgagtatgagaagtgccacgtctgaggctctaagacacattgtgaacttctcctcagtgcaggaagatggggtgactctgtactgaagatggggatgtagattactcaccatggccgggatccccatgacccattcacctctgtatctagtggaggttgtcttccttctgtgcgtccctctgctatgtcattagaggttcgtctcatttagcaggggaggctcgtgtcagctgggaggtaaggacaggttaattgctcacagcactgttgtgcagttggcgctttcagtgctgtgcttgagggaactgacactcagagagggtaggttgcctgaccgaggccacagagctagagctgtaccagcaataaactttaaacacttacgcttttaatacatttttattaaaatataactttactgcccctttccccttctggtcccttccatagtcccctactctaaaattaataacctcttttcttttagtgtgtgtgtgtgtgtgtgtgtgtgtgtgtgtgtgtaacatagaatgtaactcaagagatagcttctcagaaatggctgcatagcaaaaccagaaaaatgacaatgtcaatagatatgctcacatagaaaggggaagatctctcagggccttctccttagagaaggagagtgtttcacagcagacatctgataatctggctcttaaaatctttctgctttctctttcggactgttccctgggctgcagatgctgaggctgggatgtagattactcaccatggctgggatccccacgagccattcacctctgtatctagtggaggtttcctgtgctataaagtgaggcttctgtgatgaggggtgctagctacattttcctctgagtataaagagaagatttaaaaagtagctagggattatgttggtctagggagatttcaggagtaggttgttttctgacattcatgacctcagcagcccagagaatctggctaggttcccattaccaaccatgacttccctccttttgagtgagccccaagtacaatgaaatagctgttggttgccactaacttgtgggtacacttcttgcacctccatcctgccatgctttcatcgttgtggttcataggtattgcatctgggtagggctatttaatccccccccccctgcctcttggcaagctagactgcaagaaagaggctttcaggtcagatccaagggaagtcatctaaaagtgtagtctccagttttccttaaagctgggtggtagtctgttttgtgtatgcatctcactttcattatccattcacctggtaaaggacatttgggttgtcttcctttcctagctattgcgagtaatgaacacagccacacagccatgtgagcatctgtggagtgggctgctgagtcctttgggcatatgccttggggtggtctagctgggtgagtcatatggtgcatttatctttagttttctgagaattctcatattgatttctagagtggataacttggattatccagagtaggtgcactgataaccttggtatttgggggcggggggtagagatttatgtggaggtttcatccatacttcagatgaaccctacagttggtttttgttgttgttgttttggttttgctttttgtttttgccccactaacccaatattttctgaggaaaggcaattgatttgcccaggagcagtttatcctgctgttaagcagtctcctgggctcgttactctcttccgtttagctttgctttctatgtctgcttggtacttgatcacattggcggccattgataagaatcatctccagctgactgaactgctcacgctcagcccgttgctggtacccgggaagtcttcatgtgactgtacctggctgtgtcctttgtcactactcaggtggggcccagtagattctcgatctcccttatgcttgctctttcccatccttgtcaaatcccagagaccagcactttatcttgtcctggttgtttgcttttttttttttttttttctgaaaaataaaggacttacttatgagaggagggaaggggagagctgcgcttcggggtttctcctgttgtaaatttaagaggaaagaaagaacaccatccgttcctgtaaaattcctgccataagttccaggagctgtgtgcacccgcagccccctggtggctctaagaaacctaaaactctagttaccgtccaccagcctgccctggaaggaagcaggctcgaccaatgcatgtgtaccgaggcaggcgggtgctggtggaggcgatgctgactcttcaaagtaaattaaggaacttttcacattttagagggggaaattggcagttttccaagcggcataattacaggacagtgtgtaatgtgtaattaaacttaactatgaagcaaacgattggaatacagcttgctggaacatcatttttttgttcccatggcactgacagatcttcccctccccttgtccccgaagcagcttctgcagcaattgcttctaatttttttttaaaataaaattatatgttgccagttaaacacacagtttcatgtaaaggagcctttttcacttgagtgacattttccttctaggtgatgtggagcaaagattcagcttagaatagcaaggacctcacagcacagccttgcaggggcttttaaaaaatgattctttgtctaataattcatgtaaatactttttattcctgcctcttattctcttattctcttattttcattctttctctgaccaagggccatggttcagaggtttgtttttatgtatagcttttttttttcatgctttaaaaatagcagcattaatttcgttgattgtgaatatgcaagctgttcctgccaagcaatcgggaccccttgagagtgtgaatgcatgtgattagatttactaattgggctggaaagcacaaagtctgactcccaaagccaaagatttgaatggaatgcttcagtccttaggatgagatcattgttaaacatgggcctggattatttcagaggactggtcccctggggagggagggcagacacacagggatgtgctgctggattcgatggttatagactgcctgtaaaccacctgccacctgctgtcccacctgccttcctgggcccttcacttagtgtctgaaatctcagtagctctgacttaatatgggtactgcctgcttcggtctttcttggttgccgaccaagatgagaggttcaaagtagtccactaggttttatgcagtcctcttcctaactttaaaacaccaggaagggttggcatgatgcttacataggattacccgcgtgggaggccctgagttaaacctattgcaacaaacagaagcggtggacattaaattgttgatttgttaattgaaataaatatctcaccctatggtgaactctatggttggcacattccaaacacaggtccactgtgaattctaagctatagaaggcatatgtgtggctgccaccctcatggccctgttggcattagctactgattttcagggtacttccctggtttttctgcctcaaacccagtctagtttttctcctatatttttttacttggtgatttgactgcatgtttgctgtctctctgctttatgaccagccctgcttctctctgctaaagtcatgaggcttcttccttcaagtactgtctgtatacctagcttggaaacttccagtttcttccccctgcatggaacccattgccaccctgtattgtagttgcagtggggggagttcagaaggtaacaacgcacccctgcctatgcccaggggaggggaagggtttatagagagattgaagttttcaggccttcatgactttttttttgttacttctcaccgatggcctttgcatttgagggcagtttcaggactagagaagaattactctcccgttgccttgctggaattgcttaaccttgcagggaggtttgcattgagaaatcatgtcatctgtgaacaaatacagcagaatcatttcttcctttctagtttgtagcatttttccttttactaccttatctcattacctatgactaccagtaaacactaaagaggagtggtgggggaatatcattgcatctaattttaaggagaaagtgatgggtgtcccacatttaagtatgttatctgctgttattttcttatagatgttctttaccagattgataaaatttccttccatttttaattttaagagtgttttgacatgaacaggtactgtctgatgttcaatgtttttatttttaatttattggtattaacatatcttgaacttgataatgccatgtgttgtatcaattgattttcaattcattgcgatgtgtaattctttttattcacagattctacttaatattttgtagaccctttatttgtagactgtcattgtactatacattgcataatatgcactttacatataattgacatggccacaaaagtcaggagtggtgtgtaaccacccacttcttccccaccgccatcccgtcctttactgtggcaatcaccagcatgttccccatgtctaggattttgtcattgttaaagaatagttcacgactgcagatagagtcccacactgggcccaattctctacagagttcaggttatctgtaacagggatgctccctttgtccctttgaagtgatgctcactgtacgacacagtttggtttactcattttactcactgacaatcatgattcatttgtaggccttggtgataaatgttcatggaaaaaaaatcatctgtgttaaaagaattgtcctgatgccctgatgttacacctttggttaggtgttcgggtgttagggactcatgagagagtttaggaaagggtcctttgctctgtcctctggagtaaattgtagggagtcagttcataccattccctacctatttgagaaaactcaccagtgacattgcctgatgatgcctggtcctttctggttagggaggatattaattattgatccaattcctttagcaggtctggaagtactcaaatgatctgttttgctacattgtgccattgagggaattagtcctgtcctgtaaatcttcagctgtatgaccatagagctgtctgtgagattctgctaccagttcagggattccccagtacagcttggttcagttttcatattctaagtgaaacagtgatttgttttttctccatctccttaggctagttagtatgtgataattgtggttgtaacagagtcaactttccatttccttggtgtttctctactttgtcttttcaatgtcacagatttctactccagcttttattcctttcttttgcttgttggtgtttttaattttttcttccttttctcccttaaggtgtaagtttagaagtggttgttcctcctgcaggattttggcttagctaaacctctttgggacttgtttcgtgggagtgaatatggtttactttacagtatcttcccagtgacttaattatgtatgtctcaaggttgctcttcatcacagtacggactgttatctgaatatccagcagcaaggcctgttgcctctaccctcagaaaatgtccacagcctacttttgcacactctaacctcccacccattgctgaaataatgcatctcatcagctctctttcctacagtcttagagcaactcactagttagatctccctgcatccagctttcctcccttgtctgctcacaatatgttaatcacactgttaagatactgccttgcaaggctggccaaagcctgttcctaccacactgacaacccttgtagttcccatctaacgcaaaatataagccagagcatccactatagctcatctacgtctgctgtgtgcttttcctaggaacgacacatagtccactcacccaaggtgtgtaacaaacaacaacacagattctgctaaggtcggatgtggtgaacgagtgagcttggtgttatttacaggagtaggggtgatgggcaatccacaagaccctggacgacgccaaagcaaccacatcacctaaaagctcttcccagcatgggtcatgactcgcagaagctactgccttggacctagcaatgggtagcgagatagtttcaaagtcctcagactagtcagatttagttactcccgagtcttcttccctcctccctccaagagtgaactgtttggattctgagaaatttgctacacaaaaacttcctgtgactttgccgtctctacttctgtcccactcaactccagacacggatacattgtgctagtcattttgggctcacacaactaaataatcacaggctggttgacttacacaacaggcttgtttcctcacagctaggaaggttggaggtgtaggatcaaggtgtcagcagggtgtttcccttgaggtccttctcttgtgactactgtatagatagttgctggatgcttcaacagccccaagctggtgctgaggaacaggagaacccttggagagctgatgatctgtagtccaagtttgaagcccagagaagctgagctctgactggtggaggaatgaaactgcagaagcagcagcaaatgaagtagatgaacttgccagtgagacatacaagtaaaaaaaaagggcaaaaatgaagtgtatcccttggaccgttaatgtaggatatcactggaaaatgctgcctacatttaggacaggtgtttccacttcatcgaacttaagaaaagcccacacagctttgaccagtggattagctgattctggttaagccgagaagcatgattaaccctcagaacatctgactgcaaatttgctattaccaactacaggaaaatagcctggctgatctgctagtttttgaatcgtgatgttcttgtaccacaggacttgcacatgcaggagaaatggaatacgccttgatgagcaggtcaggccatcacaggcctgaggtttgagtggcaaggcgttaagcaatatgtatcttccgtggaagaaagccattactaggcgctggtgaggaatgttggcaggagcaggtcttgaccacaagcctgttgggaacaccaaatatcatatccagcactgcatcaataggtacacaacgggcaggcactgtggccttgagtttcctccttctcctcctcagtgtgggataagtctttaaagaaaggctctgaaatgagaaaaattttaaaaagtgaagaaattttgataaattaatctgagatacctgctttccctaatatctcagtatctgtacttccggggaaccaaaaccagaccacctctctttgatacaaggatgtgcagattgaagatacagggttctttcctgagggcatatgaagtggttcaagagacttcctgggaaagggacagatatcagttgctttagcctgcagcattttcttcccttccacattggtcggcagagattctgatcctttatatacgaattgggagaattctccctgctcaccgagatcattctgaatttcttgagtgcctccattcttcacccagaagggcagtcttcaggcaaggaaagcagggtgggcgcagggcgagttctagctagactaggagccatggtatctaagtgctctcctgtgggtgggaaggggcaggaaagcccatggggcatccttttttttttttttttttttggaagcaaatgggttttactttgttcactgactgcaggggaatcaatgtccaagattgtgattcccccaaccttactgtgattcccatggtaacctttgtgggtggttgggtgctgctgtggaggatgcaggtgggaggtgctgggcacacctcctttgttgtggaggtgtccccaactcccatcatggtttgttctgcttcccacacagcatttacaggaagcatgtatagcaaacactggccaagtgttttccagaatcgcacaactaggacatttccacacattccagccttatataaatatttatttcttcaccatacataaaggaggtcgagcagaatatcatgaacaggccttggaagtgtagactttggccgagtgcgggttgggttgtgcatttcttcctctacccaggcacatcacccgtgagggcacagcaggcagaggcagtcaccaccaatggtgttcaagagtgttttcctccagaacctggctcctatctgtggacacgtgcattgatgagtgctcccagggcccagagggagtctcgtgacgaagagcagggttggaggtcaggtacgctccacagaaagggaaagggagactatagaaggcagagggcaggaaggtggctttgtctttctgtactaaagatgcagggatctaatttttaaaaatgcagagaacatacagaaatggcagattatgggagaatatgtggaagttgtgtggctgacttccttgcaaatgactgggctgctgattctatgcacaactagctccgctgagacgagaaccattttcttcattgcttactcacttgtgtagtaactgtattagtaaattcctactgcacccagcactcagctggggtaaaaacttcacaggtaagatggccctgtcaaggctgatcccaccaggaaaaccaggacacacaacacacacacacacacacacacacacacatgccttcatccaaactggagacaaaataggaaaatacatatgactaatactctaggaaaagagtgaataaagaaatatctacaaaaagaaatatgaaggtccatagagctttagaggaaggagtttgctacatccactccaatatcgttttgttaatgatctgcataagagtatttctgtagaattgtcagagctacatattgaaagaacctagtggggaaacccccacttgtatcccaagtcggcgtgcacccaaagaatcacgagagaccgtcttgatgcaaacacatgaggcagtttaatgacagagctccagcggacacatatctcacacaggagatagcgattgttggccttgaggctcaaacgctaggggtttttatagaaaagggtctggggctgggggaggaattggtgtggttcacatgattggttcatttaaacatcagcaaactgtccgtgcagatcaaggtaacagcagagcatctggttaacatttaacttaggccagaagggcgggagatagggaggcaccaggccagttcggacattcttgtatgtcttccctatctttatggctagttggttctgggatggctttacagcctttgttctttgctctaggcccaaaaagccctcataactagcaagctgcacgagtatggaccttgaattttaattttcttttaatattatagataagaaactggaggcaaaggtcaatgctttaaaaaaggtagttttagccacagattgagacaggatatagcaaatattaaggctaggttaacagaaatttcagatatgagcagaagccatttggatacttggaacattgatgaattggccagagatttaaagaataagctaagtgcattgaatcccttggattgggttcaatatataatcttgcttgctattattattggcattattttattagtaatcattgcgtttccactcatctttagagttcttctgagatctgtaactaccacgaggcgggacattctggaacttcatctaaaaaataaaaagcagggggaactgctacatccactcgagtagtgacaaacacaacgggccccaaaaacctgggcgctgtcccgaggcgaaaagttcatggaaccttagtctcctggaattgtggcatcctgtataaagaatgctccaatgtccttgctttagttggtaaacggatctgtgtgctttcccttaatattgctttattacaagtgctcctaaggattgatattttgacatatagctaagttagattccaggcagtccttgatccgaccctggacatggatagctaaattactgccctacacaggaatttaccatcatctaggaagaaggaagtttgtggtttaaggaggaaccaaagtagatacttagaactatagatagctgatttacacccatacacaagtatttacaatggcctaggggcaaggtggactatacaatagactagaataggaactgtggcaagggcacgaagcccctgcccctggcttctaagattaagtggaccttaggtagagctgcttttgaatcccaggtgttaccattgaattttatcccagttggttcccaccagtccttccgtgtttgcattcctctgttttgtgtaagaattcggtaacctcattgtaccttgcaggtgtgtcacctaacttccctattttcttctgtataaaaactttgatgctcgatttgacacattacattcagatccacactcccttgtgtcgagtctgtttgttaccccaattcccgtcaactctatgcccatctgctggaacccctgattcccacggattgaggggggccgatcaggcccggtccatggcaggaattgtggaaagttttattgagtaattaccatatgagttatatctaataggaagtgtcagggaagggtgatttctatacaaaaggtccatatctagcctggctcctatagcagtggaccactgtaacaggatccttttatcagcaaaattgcctaagcttagaaattcttgtacagggtaagatgaaaagccatatggaaacctactactatagaagcttcttaaaatatatacatgtatgtatattaaaatatatccttatatgggaggaacctaaaaggaatctgcaatgagagagacagttccccttgtaggtattttatgctaccacttcaaaaccaacagggctgggaatgagttacagcttcctgactttttggccaaaggaacctcagtgaaactctccaaacatcacaggctgttgccaaggctactgtttgctgtccacaacctgatgataatgtcatgttgctgacacgtgttgttgaacagtaagaggacaagcttgtgcctaaacaggcttcattcctactgactaggataagatgtaatgggatgaggaccgtttaaaaagctagatctcataggacaatgatttctttttcctattctttaagttcaggtctttctgcttgaatagttattagctgaaaaaattgggtttaagtcaggaactttttcattgtagatagcattgtatgtgataatcagtaaacatgttctgctcaaaaatgtgtttctgaaatatccatcttgtctgtccagaagaaaataaataatagtttcttcccccattcctatgccctcagatccactctcctgagccagagtggatttctgaacatagtcttgatgctgggatttgagaggggagcttactttagaagcacatctcactggctgagtctctcacaagagcctcatttagtaaagcaagctctgtcagaacatgcctctgacagtacactagagggtagcttagctttaagagatctgtaatgttaacacactggtgacagtatgaaattggacttcagaaatgccaggcttactttttcatttaacagcgactacagacagaaccaacctcactctgccaacttgtgccatctttgctttcaggtgtcggccataagaagaatttgtaatcagtcacatcatatgaacaagtcatagttctgcactgtgaccctgaaatcacccctattttgccagtatggcagaggacctcagccattgcccttcctccagtcctcactcttccagttgtaatgtgcctttcttaacatatactgtggctaaccttggttcaaagtggcaaagagataccttagaagagatactggcaacctttcttctcctttgatgctgaacttggggttcccctctgcatgcatctttgcctgcttgccctccacacctcacacacacctctactataaaagtggtactgccttgccttgtaggcaacataaacaactaaggaagtatgtcaaagcaaaggccacgaaataaatctgtccaccctgtcttactcttcaagtctcaaaatcagccaacccctcaacttgctattttcttcatgcatgtcttcttcttcttcttcttcttcttcttcttcttcttcttcttcttcttcttcttcttcttcttcttcttcttcctcnnnnnnnnnnnnnnnnnnnntgtgtgtgtgtgtgtgtgtgtgaatggatcaaagagttgtaaatggtgggaaggtgggggcggggtgtggatctgggactcagctgctagactgagggaacactgctttatatttcagaacgttgtccttaactttgagcatcagtatcacctgggtgtttggtaggaatgcctaccacagggcctagtgctgaatcaaggccacattttaacaaggtctctgagtgatctgagaatacttttaaaatatggtgggtctgggagagtgaatacctatgaaagaattcaacactcgaggtgtcaaaaaagagaggcaggcaagtacacatgtccttcagtaccccacgcacacatctcgcaagcaccctttggccttctgtagaactcatctgtactgctacctatgctcgcccatctggtcactcctgaaattcaggtagcttgttccaaggaatgtttttctcatctgtgaaaggagaatctcattccaaagacttgtgaggaccaaataaagtaaacatgtgagagtttgtgcatgtcaatcatttgatttgtagtaattttttaaaattttgaggtaaaattcacatgccataaaattaggcattttaaaatgaactattcaggagcgtgtcacacatttgtaaactcaccatcattgtttaattccaagacatgatcactgccttcaaatggccttaaagagttgctgcggtttcccatgctccctagtcccagccaccagatcacatgatctctctagtgcttttctctccttaatgatgttccatattagttatagaaaaagcagatgtattgtgttttcattggttctctgctttggatgtcttttttttttcttttattctgagacacggtttctctgtgtagccctggctgtcctggaactcactctgtagaccaggctggcctcgaactcagaaatttacctgcctctgcctccggagtgctggaattaaaggcatgcgccaccactgcccagctggatgtcttttaacgtaggaatattgctagtgagaataaatcttaagagggtaggtatagaccgctttgtctgtttcttactcctttttgtggtgcaaggttccaattgaggacctcattcacactagcccagtgatgcatcactactgattccaagccccagcccaggaaaaggagctttaagccaaggattcccaaagtctaagcccaaaacagcagcagtcatatcacatgggaacatgtcaagattacaggatcccaggttcccatcagaatcagcgaaacacagttctggagatagggctttgagattggtgttttcatgtgcttccagaggattctagtgtacaatcaagtaagcaaatcactgcttgaaagcagtaaccctgtactgatgcctcaggtgctcaacacccctgtacccattcttgggtgcagcaacacacacagtggtctaggagagatgtcaaagaccagctctgcagtggagtggtagcagtggctctgccaatgctggcttgcaggtgcttaagagggccaagtccttgacttccctcattgacgttggggttagaggccacacaaacacacgtaacccattatccctgctgttgcttgagcccctccctccaccttgttcacagaggagggccagcatcgagtgctgtgattgcttcatgtgttccacatgtctggcttttgcattataccaatgtgcaaggagcgtttctttttagttgattaatgttcattttgaggtctattatgagcctccaggctttaattactacactattacccagtcgattccttgccattttatatttatggcctttattatgccttggtatgtgtaactgccatatttattctaaatgcattttacctcattaagtgggttttattccatttttctcatttgtccaggttgttatttatctcagtatcccatgtgtattttctgcttttgctttttcaccaatctgacctctcatgaattctcttcctcttttccctctttgcatgtgtccctatctgcagcgtgacaatggtgttgtacttcagttatacatcctgtgagtgaaagaaggcaattcgagcaaagctcttagagcaaggcctgagagataagctctgtggttgcaaattagcatttgctgccatgtgtaggactacattcctaaggcttttttcttttaggtatattttctctgcagccatactccctcacctgcagatctggtaggcatgtgagtctagtgtgctggcagcccttgattctgacttggtgtggtatgctggcttgcatggaataccttctacaattacagagctcttgtttagcccacttaaaaattacccttttaggactttggtggtttgtttgatcctagggacttgcctaagatttatgatcacaattagcctcttataccaccttattgaagtggcctggtgctcttctgagtaattgtctctggctttctgaggaccagtcatcctctcattggagacaggaggaaaagtgattcttgcctggctgccagctcttttcaagaggagacaaagctgctttcccctttgcccttgtaggcacctgggtctggagatataacattattcagtgtgtctgctgtcattaatgcaagtgacacttgtgttggtgtgtatgaaagctgattggtacacatcaggatttccatttacctctcagtttgtcattgtgtaagacaggcatttctctatctaggtagaaggtgggttttacctttattttcatgtcatcaagggttctaagagcgaatgctctatggtggctctgcatgattagtgttaagacttcaatgcaataaacagggtgtcatgaggggggttgctcaggggttccttactcatctttgtgctagttccttgtatctctagggtgggtttctgcctaaatttggcctgcccttccagtgtaagttggtaagagcacaagcagatctccagacctcttgcactaaaaacacaagaaggcttccggcttgctttcatgtgtccccagaggcctgtcaccagaaaggtaatcttttacaatcactgttttagtttagtttctactaaaagtgttgcacgaaatgttggccaggggccacagaggaatcagaaggaggggtggaatagagaaaatgaacccagactctgtgaagcctgtttcgggcacgttgcttccacatcgtggcttttctggcataggagtcccataaattgagtgttgtgaaatatctgtagaccttgaagacagtgaggacctcattgagcctcctcacacctcaaagtgaaagcaaggagattgagactggaagaaaagccccccatgatgacagagacattaacgcacaggaggtttgatccagggctggccccaagaacccctgagtggactgtacttggcctagtagatagaacctaatcaggaagtggaagtgtgtatcagagccagcatcctaagtgtttttgttcaccagcaaatggattctggggtcagagggcatgcacgggcagtcctgtcagtcggatatttgcagcacaggcactgagcatgtagtaccattagtcaagcccaaatcaactgggtccctcatctgcaacagtttgagaaacccggtgggagtggggaggatgtgtggaaatgcgtgaggatgcttcaacaactttgattgtgtaccctgaagaacagatctgcatccttagtgaataatggagattagtgagaagtgtctattttagggggactggggtttctgaacctactttaatgagacacagaaaaccaacccataaaacttcccttggtctaactgggccaagtccactgatgttcatgccaggtgtataaagtcagattatactctcaaggggttaggagagtttgggaatggaagatgaaaagagaaaaaaaataatttgtttgagatagtggctatctgtgtagcccaggtagactttgaactcaaaatactcctgcctaaggccccaagtgctgggattacaggtagcttgtactaccatacccagataacactttaagaattgaattccaagccggactgagactagctatgatctagaattcttccttttatcccaacagtcttgagaggataatatcagctaatgtatccctccttagtactgtggataagttggagatcagttgatagaccacaggtgtaaagacagccataaactagaaactatatacagttcaggtttacacaggtatacagtgttcttattttgtaaaacaaatttcttttggtatactacacattgtaagatgggtgatagcagtaattttaagatttcatgcatcatttgctagtaccacttttgcagaggacctcagtctgttcccagcacccacactgggtccatcagttgctagtacagctcttgcagaggacctgagctcagttcccagcacccacactgggtttatcagttgctagtactgctcctgcaggggacctgagctcagttcccagcacccacactgggtttatcagttgctagtactgctcctgcaggggacctgagctcagttcccagcatccacactgggttcatcagttgctagtacagctcctgcaggggacctgagctcagttcccagcatccacactgggtgcctcacggcttcctacaactccagctctagggaattcagtactcctgtctggcctacacaagcatgccacggatgtgcacatatgttatcctcacccccatctaattaaaactaaaataaatacaaatgtttagactttaattttggtttctgtctgtgctggctacttttaagtcaacttgccagaagctagagttgtctgagagaaaggaacttcagctgagatagtgcctccctaagactccagcagaagtttaggttttgttctgtttgttgtttttggagacagggtttctgtgtgtagcccaggctggaacttcccctgtagattaggttaaccttgaactcagacatttgccctcctttgcctgccaagcgttgggatcaaaggtgtgtgccaccaatcctggctgacacattgttagtgattgatataaactcagtctattgtaagtagtgcctgacctgggctgatgggtttgagctctaagaagcaaacggcgaggcacaaaccaccaggcagcatcccttcacggcctcttcatcagcccctgcttacaggttcctatcttaactgcctgtgaagatgaactgcaataaggaaaataaaccctttcctccccatggtgctccatcagcagcaggaaccctaactaagacactgtctcagagtataatttaacagtataggagaaaataaagattaaaaagtgtgcactggtactttcaaatggagcttttctaaatggctcaggtaggcatgacttatttcaaaatactgaagttgaatatagttatagaagtgtgtttaaaaaaaaaaaacccaaaagctactactagtttaagcatctctcactgtagtaaaacctcattagtaatagttgtaataataatttctaaattattcctgtaaagtctttcacctcaatacttaaacagggaactttaaatatggtgtctgccatgacatcaggaaggaaggtttgtttttctttgggcaagtaaatatgagaagatagatgaagtattaaaaataaagagaagggcttctccaagtgatttacatattgattacttaaattactacttaatttagtgcctgctaataaactgcgccttggaaatgtttcctgagcatttattggctgcagtaattctacctagtgtatgcggatcacatcctcattaaatattgatgccctcatgaaatgttaatagaatgttaatgtgaaatacaggggaatgtgctctctgggagcctgcagctagatgtgagctacctgtctctggctttgctttatgccctgtcttcttgctgttttcttcagtttgtttcctcattaccaggagattcacacttcttcctgatctgatgtctcagatacaattttttttttttaaaggaggaataagattttttttttctgatcgatgggaatgcagttgttctacctgcctgcttttccaagctggaattctcgctttcaaccagaatgaaatctgttaaaggaagtggggtaggagagctaggtatgaggtctccggagacaactcacaggataccctggccagggagccaggcctcaaggactgggaagatgtccctgtctggaaggactactaccctgagggtctgggtcactgcactcagcagtggccttgtgtgcagataattcagcctttgtcttcccctaaatgctctgccttgtcacctccattctcttgcctgttcatctcttgacttctgggtttccatggccactcagtacccacagccttcttgggttctgggctccagatgctgccctccaggtccaggcccctccactctgtagactagacagtgtgtcggcattctgaccttctcacccaagggttatgacctggctctctctacctggcatgttttcctgctctcagactcagacccagcaggttcttgatgaagatctgactctcaccgaccaaggaaacatccttgaccttttgacacctagacttgcaagctttctttccttgtagcgtgcttgatggattggaacttcttattagattttcatcctcctcttcatcagaatcaatgcactgtgaagtcagggccctaatgtaccttgttccttatttgaagaagtctatcctgttagttagtaggtgctcaattaatatggttggttgaatgaataaaatacattcctgccactgacaagatcatagtctagagaggtacattagtttgttttgtgctgtgataaccaaatttctgaggatgagtcacactatacagaaacaaggtttatttgtctcacagttctgggatgacaaacccacatacggtgatggactttatatgcatgtgtgtgtacacgcacacataccccaccggtgtctgtttggtctgtctacctgttcctctttttcctgtctattgcccccaccctctttatagaaccatcagtattcggtcatgggtaccacccagaaaatctgatctggtccacatcccccattactgttcccttctcctaaacaccggtcttaatcccttacagtggggattaaattttagcacagccttgaggtacagtcagtctgtcaccaaactataacaaaggagaaactgaaacacacaccaaacagcagtgctcccaggagaccagccactgagtggctgggcagcttaggggatagtagttcagccttgcaggggaagagtttccgccgtagcttcagatatgacgaatgtggttttgtgaatgagtaaagtaagcagcctcctcaagtatgattgcttttgttggcatacgactttggactttatttactttggagagttgtattctgtttccgttctatctatatgaaaaatggttcccttaggtttaaatagcaagatcattttgagctagctaaaggaggcaagagaattccttatgaaaagcggaattttcagaagatggactgtgaggccaaaccttgactacagggaagaatcctctaataaagaataggggacctgggactcgtagatgctcctcagtgtttattttctgtcaccagcatccatgtaatgccataccctgtggatgctatcagcacaggtaggtctgtttcctttattccattagtgacagttcttttcactgtggcatactgtctgactgaaagaactgagggcaagatggctttttattctggctagtgactgcacaggtgtcagactagcatggggtcagagggcatggcaaaacaaattgggtcacatcatagcagacaaggagaggagaaaaaaataaaaccagaaagcattcaggggaagatatcacccacttctccacccccagaaacctacttcatctagctagatagggcctgcctcctctgtttcaacgcctctaaagctgctgtacttttgtggcttcatcaagcttcatcaaatctacacactgaatttgtcaggaccttgtgatgtactcatttctggaaatgcctttaccgacacacccagagttgtgtaccgctgagctgagatggtttatattctactgagcttggcaagataagcaaaccactcatttgctgaggaagtctcagtgaagcactgcagctggtctaattgatgtggtccccaggcatggttcagtgagatcatgcaaaaacaaacaaacacaaacacagggaacctttagcaagaagtaagccacggaagtgttggagttgtacacagttgctgttcctgaacaggagagattgtctgggagacaaggaagaagtcctgtcacttaagtagtaaatctgtatcattttgtctttaaaaaaaaaaaaaaaaatgcttcccaggctcctatgtgctgaggaaaaccaacaagccaagcaaaacatcttcctgaaggccagggagctgtaggaggcttgaaaagtatcaaagtctgtgttctctgtgttctatttagccataggtggaggatgacccagaggctgtcgtgatccactttacgtctttctttggagcgagcctggagccttctgtgtctgggcacactccctttcctgaccgatccctcttctctccacagatcgtgctagagaacagcagccgagaagataaacatgagtgccccttcggccgcagcagtatagagctgaccaagatgctgtgtgagatcctcaaagtgggcgagctgcgtgagtactcgtgtagatgccccgtgggtgcagagtttagcagaccctcagcttccaaggttgaacccccacctctgtgtccaattcagagcacttagaccttcacatcccttcattatggtcccttctctggctcgggtttcctacatgtgtgtttctgcatgtttgctacgcatagatagatgaaagactataggaatagagaagttggcaggtattgtggcagtttccaatattataaaaatgagtacatattacaactgatgcactgttggtgaggtaagagacctgtgggtttctcctttattctagtttctagtcttcttgtagaccatttcctttactttctctataaagaaaagttgagggctggtgagatggctcagtgggtaagagcacccaactgttcttctaaaggtcctgagttcaaatcccagcaaccacatggtggctcacaatcatccataaggagatctgactccctcttctggagtgtctgaagacagctccagtctacttacatataataaataaatacatctttaaaaaaaaaaaaaaaaaaaaaaaaaaagaaaagttgaatgctttagtgaaattctctttctaccagtgtttcagatgtgggaatatttactctatatagaaagaattattgaaggaaatgagtagctgaaaatgaaaaattggctagagatatgctttgggctctttttcctactcacattacaaaatttatgagaggacacacagaaaaagagataataatgtccttgcctgtttgttcattggtacaacctggctttaacatgtaggcggatatgacttaatcctcttccgttgtccttgccaatgtcaagtctccttaaagcagctgattctcacttctaccatctatggtactggcacaaacatataaatccttcctcttaagcttagtagcatgagtgccagagaagactggttatatcaggaaatcgctgggggtggcatgtggttctgtcctgaaaagcacagataatatggccacctgtttagagaacttaaaataatgatgtagagtgattaatgggaatggacttgatgattaaattgaaaaatgaattatgttttatttacactgtggagaaaactactgttgagaacaatgggaaaatttagggattaggaaaaacctaagaagttgagctgttggaccatgcaggagccaagcatcgtccaaccactgccagttgggtaaagaagccggccttggcatggacctgctgaggaaggccattgcctgtgaggcctcaacactgcagagttgcattaggagtggggcagcccactcagcagagtctgctaattgacgctcttcactgtgtgttgagatttcatagggatccctgatgtgagttgtcttttgctttcctaatggagcctgttgtcttccgtatgggttactgtttgttcggcttaagtatgcaagtcctaatcaaacaacccccacgtactctttcaatctgataacaattttgtatttatcttggtttcctggagggaactgtttaaagtcatgtacttacaagactatctgaacctctctatttctagaaaatgcagagacaaggatttccatgttcaagttactaagctccattgcttctttttcacctgctctttccatctccccaataccatacattggcattttgatctcatcttgagggaaccagagagtacacttgtgctgcgatgttctgtgcatggctttctgttcttctccttcgctctgatgtcatactcttcccaaaaatgggcccagtgtcggggaaagagatgttggcaatacagaaatgctgcattctctctgctaccatggtgtctatgggtaattactcaccagagtaaatggctcttctagccattcctggtacctataatgggagcatttggggtgaaggactgagtggtgtctttactttataactgaaagtgcagaaacatcagtgtatcaggagcctgttaaagcaaaatgccggaaggggctgtcaagggaggcatggttggattttagagtgggttgtgggtagggttactgtggagctgatctgaggtggtcctggggtcactgcggcagtctaggtaaaggaaaggaactgtggtgacaggagtctgaagtcacagctctctaggaagtctctgcactgtgtagctgaaggtgatttggaagaggctgcagggaccagcctttggcaatgtagatttgctctgatagctcttagagggataatggtggtatccctctcctgggacggagatgatagggtagagatgaaggcgtctggcccaaggacctggcactgtggtgcagctgctattcttatatctcccaacttctaatgaagaaccgcccttggcattccatgtagctcacacagcgagtactggagttgcctctgcaccaaggctgggtttgagtggcaaagtggcagaactgttctttcacctccgataaggatttacatgcattcactcagttaaaatctactgagcttttgtaatgtgttgcatactacagctgtaggtgaagcagatagcgtgtctcaccacaggaacttctggaattttcttaaacctcagaaagtgaaaggatgggctgggactgtcagcttacctgtgatttttaaatttatcatgttttaaaaataacgtctatttgtgatacaggccgatgtttctaatatttggatagtttcgtgtttaacttccaatctgacctgctcactgtcatctgtaagggccattctgggtatctttcaaagcttgcaaagtgttttcacttctctgaagtgcaacatgcccaaatgacttgttttctgctcataaaatataaaaggacggctacactctgattgaatgctggacatcaaatgataaaataccccatggtaagaggaaaattgcttttttaaaaatggattgccttttgctcagtgccatattaaatacgttactaatatgaaaaacccatttgaatgtacccttatactgaaggagacgcctatttttcttcttctaaggcaaattagtttccatgtgcaaattcatcttttcttggcttatttgcttattttcccttctcactcttaagttcacagttctgaagagttctcagatttgtgtgaataattgaccttgaaatcttggtcaatttcactgttagcaaatgctgagaccaaagaaatgcccagttaaaaaaatctaaccagagagagcaaaaggatgtttataagtagaaagatttaattttctagaaattatttctactttgattttaattttaggtctctctaggaaatttagtttggaagtgccaattataatttggtatctaaagcaaacattaaattacagataccaaatatatgtgaacatttttttttttaggttgcttaagtatatacacatactcttctgcttcctaagttattgggatgtcaggaggcaaatattttctctaatggtatggcttaaaataacatctatttctattctcagaccactttatcaaggttatttaactgaagtctgtgacactcaaaatcaataatatctatgtttattaatgaagggaggtcctctgatgacattttatggagttactcactaaactggcactcaggacgtccaggggactgcagagagtggtaggcaaagagaatggtggcatttggacgtctgaaggtcccaacctggtgcccagtccagccacttgttgggtgtctctacatgctctcctctatctatatacataataatgataggtcccctctctataaacatactacatgttctgcagttgttggagcttaaatgaaatcatgaacattgctttagtggaaacaccagtagggttctttttttttttctttttctttttttttttctttgcaagtggccttaacctgaagattaaatcggtggttgggggtgggggggggtgttgtttctactttactgggagctagtgcaatgcctttgtttctttattctacatactgttcaaacttactagagtcagccctccatctatgtggaattgggacccacagaaccatccatctctggatttaaactatttggaaaataaattttgtccatactgaacatgcacaaacttttcaccttctgattgttgtctaatacaacaatggctatttgtgcaccatttacagtgtgttcatttctataggctatgtagaaatcattctaagcacatgggcatttatgcacaggctacatccaaacgctgcatcatttacatagggctggggcttggatttcgtttctaatgggtttaggatgtgctacctctatgacagaaaagcagaactgcattcttttcatcctgccttctccgtgaggcttttttgagaggaagacatatgtttcccttagtttcagctttagaagccacaaagaatccttacaaagctggatatgatcacgtgcagccagagtcagtgttgtatatttgtcaatccaaagaaaagaataaaactgagtggagaaaaagagtaaagcgttcaagatataaaaggtatttatttgcttggagtttttgtagatgactggaaggggtggtaccccttcttacaggaggaaggaaggaagcaaacccatatgatagctgcagacctgagtccttgggaagctattagctcccaatagggagatataaagagatggttgcgttgtttttgttttcataacatttttcttcaaataaataatgaattttctgatataaattgagtaactgctttcctgttgaacctgtaatacattgcctatacctcaccactagctgtggggcatcttctctatatgcaagaatcttagtcaccgtgccatgaacttagaacattttctgaaacctcaagctgcctgcaggataactggagcacccgtcacatgaactaatggttaaaattcattgccatctatagtatttcattgatggcagaataatgtttctaggaggcagtgttattgtgaatgggtagaggtagagaaggtatgctagagagacataagagcttacacatgtggggaccaaagaaactaagaataactccaagaatatagacatgtaggtctggctagagagatggagggaatggatgctgaaaaatcccatgaagaaactaggtggaaattctgagtgttcagagaactctagttctatgtagttgaagaggaggtctggggagcaagctaaaagaggagatgccagttgctgatgcaagtgaagttgttgtgggaaatatctagagctagcccctgtaccaggtgatcacactcactaggtctctttgcctgccaacttgccagccctgctaggctatttggctcccaccagtccatctctaggatgccccccctccccagttcctcttgctttcacacaatgccccacgcaccactggttagccactcttactgcttaattagccaatcagatttatgtatcaataataacacaatttataagatgtcagtacaataatttcagagccaaatgacaatgataaagctttaacacaattattctatccttttgataacactacattagcctgtattctggttctctttcttccacatacctctctctctgtctcctcaactcctcactctgcctcccttttcctgtccaatcacaagcctcccactgccttaatgtgattggacagggaaaatcctgcaacatgaaatcataagtatttgtccctcagaggggtttggacccgaccataaaggccatggcaaccaatagaaggatttgattcacagagggctatcctcgtcaggaacatcaccttctagagtttgactgtttattgggtgtgaggcggacgtttaagaatgatgatgtgtagagccaggaacagtgccaagccgacatccgacaagcttccccaataatgcagcagtgcagatgattccagctacagccaattgaaatcccacttgattgcatgagggcagagtcagcaggtccgaggcttgattaacctgtgtgcggaccttcaagaaccccagtctctccattagtgctctgctgctagcagattcgtggctcctgacacatgtcccgagggtcacttctctgtgtgtgaacatgtttctagaagtcatccacacactcctctccattatcaatgtctgataccttggcctctgcccacctcgaccagacatcagaacacggaatggggctggcccaggccagaccagtcattgctgctagttagactggaagtacagcaggcctatcctttgtgtgtgactaccagatgcccatcatagctaagagcaccagagttctgttctgatggagaaatgattgatgtcttggaatattttctgcccttatatgtgaaaagactttctgtatttttcttactgatgtactaaactacaacaaattatggccagattactgcctgtcttgtgtctcctggaaactgggcaaatgcactagagttttttaatatgacgatattaaagattgctgaaaaagggaagtagaggtttgactataatgcatttctctttcatcagcaagatgcaagggctggggctccactccattacactcacgctagcaaatgggtgttcccagtgcctcacataatcttccgtgtatcggtccaagttgagttctgaaggacagatggacacctttgtggtgaaagggtccataatgccttcagttttgccctgtttacctccataaccacttgcaattagatcaaataacatgttctatttagagaaattaatgaggaggaaacttagatcacactatgaaaataataatcacttccagaccgtgtcttttggggcaacatttattcaaacaaaacagtggtgctgagtggagcatcttgctccatttatcacctagacacttgtgctttttaacaagtaaaaaagaacacacggagcacatggaagtacccttcggcctgcagcagcaattagaacagactcttaactctgggacattggtgtgtgtgaacgttgagtgcaacaatccatcactttcattcttagtcacaacattctagttgaagaaaggacaagaaaattagattttagcaattacatctattaaggtcagcttcctctccacacactagcttgtgcgattaacccttagaaagctaagcttctcagaccttggttctgcctagagtttttatattgtactcaactttcttattaactttcaacttttgaagtaaagaggaaagacaaagtaaacacttaaattcaaatatggcttgagaaaacctattttagcattttctctggcattcagagtctaaattcctgagtgggcatgtaggtttctgtcagggtggctaacctggctccctctttaccctcgacatctgggacatgggatcatcacccccttctcttcccccttcgtcttcctcctctgccccgatttgatgattgagcaaggagcgaagagagagttctcggttgactgtgaagtgctcgtgtgcaggcgatgatcttcatcaggtcgtgcacacacagaccaggagacacggcatatctggccggaaagccagctctgctgcgccgcattctgcagttcataaacgttcagctttgtggtttgtttgttcatgtttgcaagggtaatgctacatagggtttctggaattacaagaaaatgtttgtcctcatgagattggactgtgaacagaaacttgacagtttaaaaggacattatacctagcatatctccattacaaatagaggaaaataacttatgttattctgggctttttcttagcacttacttcactttatactatccgtgaaataacatgtgaactggaaacaagcagagtctattcctgttgcctgtttgagtagatttcagattgtgaagtgagcctgcaggtttgcccagccctgaagggaagggagatgcaggcctattgagaaagcctgctgtgccatagaagcccttctcgaaatccttctctccaagtgcccctccagcatcacctgggcatggctctcctgatctcagcttgctctgccatgtgaggcatcattctccttgaaacaccatagcattttacctttgtctcctttgttctactcctgatttcttgataactcttggttttgttttgttttgttttttatttgtttttgaatttttttgttggtttgttcctttttttgttttgttttggtggtcctgtttttcttgaaatggtttgtttatacttaaaaaatataagatttttttaaaaagaaaaacaattaacacacataactaaataaaaataactgaaaatgatggtgagttgtgtttgcaaaatgcatgttataaaaagcctttgtgtttacctaaaatggtcactggatctgactaaaaattgatttgtaagggtatgtgtatatgtgtttgtgtatgtgtgtgtttgtatatgtgtgtgtttgtgtgtgtgtgtgttgttttataaaataggacagggtgctatctcactggaataagctccatagaaatccaaacactaattttaattaatgctaaattaatatttgttgacatttaatcccaggaataaaggatattagagtaggataagtccccccccccgtgtgtgtgtgtgtgtgtgtgtgtgtgtgnnnnnnnnnnnnnnnnnnnntgtgtgtgtgtgtgtgtgtgtgtgtgtgtgtctgtgtgtgtgtgtgtgtctgtgtgtgtgtctgtgtctgtgtctgtgtgtctctgtgtttccaaggatataagcctgaggatagccttaggaatcttcctttttttactttttaaggtttatttattttgttatatgcatatgcatatttgattgcatattgcaccatgtgtgtgcctatgacggccaaaagattgggtcagatccccaggagttacaggaactgtgaatagttttgacctactgtgtgggtgttgggaacttaccttttgtcctctacaagtgcagctggtgcttttccacgctgagccatcagtcagggcctattttgccttttaaaccttgtctctcaccagcctggcagatatcaagtagcctgggctgcctgacccctgagtcccagggttctgctgtctccacctcctcagctctgggatcccagacctgttccatccctccttgctttttggttatgtggattctgagggaggaaatcagtctctccgttttgcaaggcaagcactttaccaactgacctgtctgtctagccccaggatgatcttcttatcattaaaaataaagctactgtaaaccaacaaactaacatatttaaacctgaaaaaaggttgaagaaccaaagtaggatgctgtgagatgctgacattcacatttgttattttaccgtggtcaggagaacacagcagaggtacagttcatcaacaaaaacagtgctttaaattatggataacaaggctttctatctaaaactccctgaagaacccaaggaaaagctgttagtactgacctaaattagagggtagatgctggaggaatgaaatttagtagattttctctatgtcattgatgcttaggtcattataaagtagaaaaaaaaattgtggacggggtagcaatgaaaataatcctagtggaaagccccttagaggggtaatgaaaattgtaagactttactagaaaacaagcagattcctcataaggaaatattaatatgtgaaaagtatatactctgttgcacagcagtgagctggcccctatcttaccctggagtagcaatgggaattaagacagaaatgtgacagagatgattgaagagttcattggatagaaaaaggccaaaattgctaatgaagtcttgataaagaataccaataaaaaaagaccaataaaaaacactgcattaagcactacagccccaatcccatggagcttggctttcagctactacagaagaaaacctgacaccaggtaatttataaagagcagatgcattccttcttactgttcgagcacttgtgaagttaaactcatggggccacatctggtactggcttcctggagactgcctagatttgaaagtgggagagctgggagagttgctgtaggacagtggggcatgttagggactgagctcagcacttcccaggaacttactaagacaatacctgactccctagtaacagtatgatggccatgcctggacaggaggaaggtggaagcggggtgctgtaggtggtacctgaagtcctgtgcttagtatgctgaagggggaagtgggagaggggcaagagcagtttccaaaaacctggacataggaaaatcagacccatttgaataaatcttgttttagatccagtggtactcattctccaagactttgcagccagaaatcacctgtaaaaggtctcacctcggggaatgagtgcattgtgcatttagtttcctttggagacacagccaaaatcaacctttcacccaaactcaaaatgtaattcttagttttttgccacaattagaatttttatttttctgtctgtttttctctgtgtctctgtatctgtctgtctatctgtctctctctctctctctctctctctctctccacacacacacacacacacacacacacacgcgcagtgattagattatgaaaaatgtttcttatggccagcaggaaaaaaaaacccttttaaaatttgtgaagaaacagtaagctaaaaataaatataaaaacaagcctttcaaaggctgggaatgcagcccagggttggtgaaggcacaggactctgagttcagtactttaagtttccacaaaaggaaatagactgacaaacaccttcagattggacttggttctggcctcttatctgtaagggaggaacctgcatggcaagtgccccaccaagagaccttgaggaggaagaaggcagcaaagactgctgctgctaagaaagtgcctctctgtcaggctacagcttatgctgaccagcagaggttagagagaggctctctgcctcctctacatcagaggtgtgtctcagggcccttcttttgacaaatgtataccactttcacttctggactatcataacttagtgaatatagcttgcctaaagtccatggttatatacaagagcagctgagatcttggacatgtggcttcttatgaaaggaaaatcattaaatagatcaaaaacataaaattaatagattccagtccccaaaaaggctgtttacatgaatattgtcatcatgctccatctataaagtaatccaagttttatagttactccaaaaaaaaaaaaaaataggtaccgttgaatcctccctcccctgctacagtgatgccagctgcttcgaatccccaggctttgagctgtggggctttatctggtctgcttgtttgtttcttccagagcatcaagtaccatttcacaatttattgtagggtcatttagaccagaccactgtaagtctctgatgagccttagcatacgccgacctgacaccctacttcccccaggtgaacaacgaggagcaaaagcaagaggaatttattgttcgtacgctttggtgctatcctgccccagaaggagaggtggcaacctcgggcagcccatttggccagtttttatacagttttcagcggttgaatagagcaacagccactaggcacaatgtgaatggcagaacaatgtgacttttaaactgattcatccttagggaatgaggtagcgaggggttcccttatctgtgggtacctaaaggtctaccctgaggaatgtgtctatgtgctctgttctttcctcatctgcaggttggtccccctgtggtctgaggaatgtaattagcctctcccttccagaggggagaggtgcctgtgtgttctatgaccttcctcttccaggaggggaggggtctggtggaattctccaaagttcctgagttgaactttttcttcaccatgacctccaatgtctgagttgtaagaattacattaacatgaaagagaatataggaaaaaaaaataataaagcaaagtttaagccgaaggcatcaaggttcaaacagattaaaaacaaacaaaacaaaaccactaaaactacagaaatagcgctgaaatgatgacagatactaaaatgtaaaaattttaaactaaaaaagcccaccatgaaagtttttgacattctggaagttctgtccccagggcttagggggcagtggaagagagagctctgggacgcctgttttcctcatccttagcctcagcaggcagagatctgccttgtaggcggggtagattagaagtaacttttaaaaagatttctattgagtggatgttttctaaaaggtagagagttccaaggtcaacattaagcacaaactatctctgaggagccttttacatttacaaatgagaaaccagagacaacagagaaaggtgaggcagatgaaggtcaagaggacagggacagacagacagccccccccaccccccatgactcttgctttgttaactctgtgctcctgattttcctacactgtcctgtgttccttatagactgcaaactcccttggggactgattttcagtgaattcatttctcacctcatccctagtggttcatacacacagtctgctttcaagtcagtggttactgcagggttagagtcactgtttgcttcatgatcaactataaatgaatgagtaaaacaaataaaaaggaataaaaagatacatgactggtcccgagtttcagccattcattccggatgaatgaaaaaggaaacaaatagggtaagaaaggaaaaagtatgactgttcataggtatggtggaggagaaagtttattgtagataaatgggagaccatagtcagaggcagggacatctgggagaatccagagttgccatgtctagacagagctgggccatgtggggagaggaaggaagaggggaaagaggggagccagttgcggcagttggagacccaaaagtacaaagagggtgagtaaccaaactggttggattatatagggaagagcggcccagctccctggactggagagttcaagctaagaggctggcaatgccaatcaaaaggactctgtaacagtcagggactcagggatgctgagagagcctggctgccagatctgcttctatatgttaaataggcaccttggcctgtcctgagtttgaaacctaacaaaaaccacatcactgtttgtttgtttgttttttattttttcctgaactttacatcttccataggatctctcaaacactttcttgtttcaacctggctggcagtgaggtacataagggtctctctaaactcctctcctcctcagagtaattttggagggctcaataaacaaaatgtctccgtagatacccttgcctccagcaaggtgcatgagcagcagtctggaggcagggggccttatgcatggatggctgcaagccaaggaagtccggcatacccgatctagtagtcacttggaggtcagtcagcacagcaacaggtctgtctctgagtggacatgttccttgcttcactgagaggatttctgacctgtttggaggactagaacagtaaagaacaaagttcagcatttactcaagcctactgtggcttcccttaatttggatttccaagggtttgggccacaagaacagattgcagctgtggcctgagcatctttggaagtgtgaatcatatttttccttctgaagaagctattttgagctttataattgcatattcccatgttgttgtttttcatagagtgagtaagaggaatgacttgcgtcttttgaaaatggaagtctgctttctttgctcttgtgtcttatgtaacccagtctgttctgaccttgtgattcatgaccttggctgtgtatcagaggcacttgagaaacttctggggaacttgaagttcagcagagaaatctagaggctggcatattaaacacactttagatggttcctaggtacaggactggatttgtacctactatcctgtggtgattcggactgcatgcaagtgtgcatttccacagtgtacagagctcttgagaggcacttggaaaacatggattctatgttagctcactactaaccagctctgaacatgtctcagggtggtcctcgtgagactccgatttcaaggattaccaatgcccaggtagcttccacttttaaagcaaccgggaaacagactgatttttaatttaactaatacgattatcttaactactgagttagtaatactaggaatttcccaccaaaggttgcttcatggcctgtgtattagccatgtttttatctgagagaacagcttaaaggagttccagagagtgagtggctccgagcacagctgctgtggtggtctggcacaggatggtttttctgtttgtttgtttgcttgtttgtttgtttgcttgtttgttttcctggacaggaaacagaatgaaagggtccaggacaaaatgttcccttctaagatgaagacttgctgcctccaaccaggaatcttttgctatctagaccctcttgaaatagaaaaatgatctggagatgaagtggtcaacacactaacttatagggtgctttatatttaaatcataaaggagttttgatttattcgatggttggttggttggttggtcagttgcagtgttggagattggacccaggacagcatgcaagttgggcaagttgggcagcccatgagctgcatccccatcattaccaccatcacctctaaagaatatttcttgcctaagttagctaccgggctgtttccaagagcataaaggaagtactttgatagaagtagagacagggcagtatggacccaggcaggtttcaatccctcactatttgcacacagtgttaaataagttgtggttttctcagtctgaaaaatttccttctttaaaatagaaactcactatcagttttatgaagtatttgggcgagaaggctttcagatttaggttatttttagatcttgaaatacttatataagtagataatgaaataacagcgatggaacccaagggtaaatatgaaattcattcatgttatacatatatacatacatacatacatacatacatacatacatacatactactcacatagcctgaatgtaattttatataatttcttaatgattttattcataagacgtgtacagtgtagaattttctaccatgatgtaatacagttgaccaacaaaatttgaggactgggcatggagtgacacatttcaatttcaactgttactgccagcaagagtcatttgagagtagttaatttttcgattcgcaattccattcttccccccacccccacccttttttgtgtgtggagactgaacccagcactttgctcatgctaagtgtttgccatcaactgaagaacatcctagcctgctcctgtcattccctcctgccaagctcatttcccccaggtattctcaaacctagacgtgttgtaggttgtctacagaagcttttggcagggagtggggtggggaatcagcctgggtagcctatgagcatcttttttaaaacttaaaggaataagaaagaataatagaaagaggtgatggggcagagtacagatgggggctgcccagtgcctctgagcacctttgggcagaggatgtagagcaagcacttagcagctgctggaccaatctgacactgctggtgctttccaacacatgatctgttttctagtgattaattgttgctataagttttaaaataacattggtttctaaactacaggttaggaaagtgaaacaaatgagactttaccacagatacaagggataactattttaaaaggagtatttacatgatggaaaaaaataaacaaacaagtcaggttgaagggtaagagtattaccaccaactggggttggaaaactctgtatgtatttctatgctcataaacagagtaagtggagaacaggcaagggtgtcctgacagtgaaggaggcctgcacctccacagcaactttacttttcttaaataatgaaaagcgggagggagggagggaaggagggagagggggagggagggacggccaggttcccttcctacagacttccacacagctcactgaacatggagaggttgatctgatgctacatggagcctggacatcaannnnnnnnnnnnnnnnnnnnctgtatgtatttctatgctcataaacagaataagtggagaacaggcaagggtgtccagacagtgaaggaggcatgcacctccacagcaactttacttttcttaaataaagaaaagcgggagggagggagggaaggagggagagggggagggagggagggagggagaagggtgagggagaattcttcaatgtggcctcattgggaagaggcacaaaacaagatccagtcttccccccatgtctgtcttcatgattcctgacagcagagtgaggtttaaatggcaacaaggtgtgttctgcctcccatggctgcctgggcggagactgtccttaggggctagtctccaggacgcaagctcctcctcctgttgccttccccttcttctctcccagcagcagattcctgggggagagtctgatttcttggggtctactgtttcaatagtatatagccaaagaggtagcatattgtccctttagcatgacatactcatttctgcctgaaagctcagaattcccgtttctttaacacctcaatctggtgaaatatgaagcaaatataaagaaaacctaagtaggaacaaaggtcagaacacattcggatattgtcaagtcattctgtgtaagaactgtttttccataacctcctgtgttttggttacttgtgaaagaatgggatgccaaaagctactacatcttgttgactcgagacagcgtctccacagaaaggagacggaagtgggcctcaaatgttgcttcatgttctcatttgctgggtatagaggtgagcacagccatgcccatgtaactagtcactcacatctttatctttgtacttattttcactggtcttcacagagaaatgtccgtgctgtatcctgagccagacagtatatattctcagcatcttttctacgtttcagactaacctatgctcatttctgaaaaatcttaaaatgcaaagaagcaaatccattattctgccaccaaaatataatcatgtttctttccaaacttttttttggtattaaaacagaattaaactgtactatttttatattacactctatatttaatatattgtgcctatgtttgtttccacaacaacggagatataatgatatcattatttcatgtctggaaccactgtaattaatttgatagactgcttttggcagcatatttagagatgtttccattttctgtgagaaataccactgtggtgaacatccccatattttcacctggttatttactgaggactaattcacagaagacacaggcatgttaaatggcctgatggtttaaggctctgttattgtttggcacaatttatttctagaaactcagcagggttgctcctctgctggccaggcctctgcatctagacacagctttgacccagggtttaaagcactgatgaatggtgggtggagaaagcagtctcgttggtggtgaacctgagatgcaggtctgatactgagatgacaggtgagtcgctcatagacactgcgtgattggcatctgtgtacatggtggagacctgtatgcacagctggctgtagccatgccatgactgtggtgggcgctagatgatttgtatttatgagaccttttctctgtacgatgttaagctttgtgttttacaactgagctgttataaataatagatcccaggctgagttcattattatatatgtgttgttattattgttttccttttgacttaaaaataatcagtgttaaactattttgaggaatttcttcaatggttatatatgttaattaaacagggccttatatcataagaataactattactcacggtataaaaagtgaaagaggcaaattagctgaatttgggagtgttcacgattgagcagaggagtcatgtgcctcacgtctcctaagagcagttggctataatgaaagacttggctcttgacatttaaaaagaatgtttttttttttaaagtaaaagctcactgatttctgctagtctacactttgctgctgttgctgatctctgtgtgccattgatgggtgacacgccctgaaaccagtcactgtcatccatggcttcacatgcgcatgccctgaagcatctccctgctcataagtctcctgcctgctctgcatgttcactgcagttaccctagctcccatggtcactgtcacacctcctcgtgtgccccctctgcactgtccctgctttgtcctacacactagtcttcttctacgatctagtcagagccccacgtgggcacctgcttctttttgggataaattccatgactgcttttctccttccacacttcacagatctcagtatgatctgcttgctcttccccgagggctcttccacactctgcctctttagtttagaacacacttcttactttctttagttttcccaattcagacccacacctgagcttcgctctccaacagcactcttctactgggcttgactcctgtccttcagcctatagacaggtctcaccccatgttgaaattgagtctgtgggtacctttgaaatgtatggaagacagttatggtagaaaggtgaatccttgtctgtgtagaccatgcttgaagtagttgatagttaatagaccaccacaatcacatagaaagtagaagacagcgtcagatgcagatagtgctcagcagactctgattcttgctgcattccatggaagcagcattaggaatctggctaagagtttgccctaacacacggtggatgatgtttgttggagacaggccaaactcaggatggtatgtgccactagcaatcaggtaaagtcaggcaccagcagttggggacagctgtgctgttgctgcttctagtggtggtgctggtagcgatagtgatgatggtggtggtggctgtcttggtggtgatggttctaaccagtaggatttgggtctttgctctttctgcatgagtctggggctcaagtttctttgctgttccaacgtctgaggaaaaagtagattcaaagctagataagtgagattttcaagtggtgaagcatatgcgtgcatacacacgcgtgtgcgcacacagacacacacgcacacacacacacacacacacacacacacacacgcacgcatacgcacatgggcacgcacacaccgatgtcacaggaaatctaactccctagtaagtaagtacatttgcccctccattagcatgctgctggttttcttgcagctgtgaggggaaaaggagccctttgttggactttttcattttaccatatcctgttccgcagattgtctgaatctaaacttagataatagcatattttctatcattttttgaatcttcctcttgagtcacgaccttgaatcattcaatttctgactttgaattgttcatgagatgtgcttctgggcattttatctcaaggaagaagaaacaacaggagctggaaagaggcagtcaggtagatggctctttggaagactcatggggtggggtgtgcaataaagaaaatcactttagtgatttgtgaatagtgtttttaaaaggtgaagtaaaacaattgtttgtgtgtacaagcagccaaggtaagtgtctcattatatcaggtttaaattcatgtgcctgtgtactaaggtgtgtacagaatgttttgttccgtaggccacagctggaaagttttagaagtcccctcaacccctgcccatcataagcaattctccttgaaattacttattcaggagggcattgctgctcccactataatagatggcttctccttttctggttcagacatgttgtttccctcagagttgagttttgggaatgggttaccttctgcactgtaatccagtgaggctagttctcatcacagccacctgcttatgagtctctgagtgacaacagccttggttcccaaggtagttccccatggaaataacatttagattagaaaatgtaatctgttcatgtgacgtattccatgtgtgcattggagggaggcacaagatgtatgtttaaataatggggcaatgcccatccttaacctacagagtcatcctacaggaacgtgattttaaaacagctggtgtgtttctcaattagttcactattttatatgaaagagagtattctgattcatatactccaaaatgaaaagccatgacttaaaagtccctttgtaaacccaggcagaaatggctcattaactgataaataccttgcctctactcaactgtttcacacacagtcaaggggatggagtaagtggggcatgggaaagcaatttcaaggtctccggcaataaggaaatcattgcacaggctttccttcctactcaagacaggtttgtggaggtgcctgtatggcctaaaggcttgggtggctttgtaacctggcttctatttggttttcttgagttaactttctttgaaaaaaaataaaataaaaagacatctttctaaaaagctaaccctagaacaaaaagagttcatgctttgtttagcttgctcccgtttgcaagtataagcaagtcagatcactgcatgtctaccctgaccctttttctccccagctgtgtaaaatctaatattgtccagtctctgtggtccagactcatgttctctcctgctacaaaccttcagcaacctccactgatgccattgcacttgagttgaacatctgacgtaccatcttgagacatagaataggcatggtgatgggttcccttctggcccatgctttgtatatttgtgtctgcatagatctttctgtacacatacacttacatctgcatgcatatatgaaaacaggggaccacactccctctgtagttcggaattacctcttccttactcagaattattatatcagtaacttccttcaataaaaccgtcttaataagcagacaacatttcagtgtataatttacccttaacaaagtatgcttttctgttaaaaaaaagattttaaggttaaatcctattacaaaaacttcttagatttaccactagaatgaattcagagaatttctttttcatcctttacttggaatagatttccagaattgaacttgctactcaatagatatgtccatccttaagagatctactatgccactatattctcaaaagcaccctgcgtgtatcaggagatgggaggcagtgcctatttcactgtatcaagtgtagtcataaaaagcacagcaaaatatagaacctcttctatcactccagagttcataccgcaaagaatacaccattgcactttatgagaaagaacacttttatgtatgcattggctagcttttgtattaaaatggttggttctattctaactgcatcacactggtatatatcttatatttggtaaataagaaaagtcagcagtccttactcatcctaggctccagttaataagtaacatgttattgacatcggaaccaggaaggttgcttctttaaaataatctgatgtgtgattcctgtttggaagacttgcagaagatcaatcttacttaaatattttagagtgttctgaaacattaaaacggaggtgctatgttgattggaactctctgaagaatccaagctgtaagagatcattcccggtttctgtgggtaacagtgctgggagacaggaggtccagactacagcatctggagccttcttgctgcctgtaactgatacgtgaaaaatctgggtcccttcatgggtacctattctcattagtaatacaagttagggatagactcaaatgggaagctcttggatacttataattgaggtgtgggggacacttcccagagcaggaaagctattatcctctgcccagagggagagagtgacggcgaggaggaaaagaatcccatactttgaatcaagctggcatgggcatcagctacatggcagggagggggctttggaaaaagcaagcaggctgcagcactaggaagatcaggccctgcacctggcctgaacaacatagccgtgcagcgcctgatggaggtgggggggggggatgcaggtgagctgccctgagggcatgtgtgcaggagagctggcatggccacttctctggcctgaggtggcataggtgcaaggattattggtaggggtgaggaggtgattctctttccactccccaccctttgccacctccatgtggatcttctggagagctggctcaaagggcaagagaacaagaaagctagccctgcctcaaagtcagtagtactgaatggttcctatactttgcctgggcaacacagtggagctggccatcatagggaaggaatggacaagccagccccaagagtgtgagagcaagagagttgaccctgcctcctgctgatggtggcatgtggtagtttacctgaatggagcagtgcttgcgagctcaccatagaaatgcagctaccacgtaggcccaaatccagggctctgagttggcccacctcaaaatctttatcagctgtaaacatttaggctggggcttgtgaaagggacagttctgcctatccaaagctgcaggatgtccttgacacaaggcaccaacaggataatcaaggggaggtctggtgaggatcctgtattgatggagtcacagaagccagagagctcaaaccagaccaatgactcatcgcaatgagcatttgcaagagaagatgtgtggccaggggaatagactgtgtcacacacacttcgacatactgcagctttcctgatgagatgttttcctacggtgtgtgtgtgtctgtgtgtctgtgtgtgtgtgtgtgtgtgtgtgtgtgtgtgtgtgtgtgtgtgttattttggagaaggaattttcataagtgaagggtggatatgaggggaagaggagatgagtggaactggagtgcatgatatgaaactcaaagaatcagtaaaaacttaaaaatgagcaagcaactccagagttccagagaaagcatccttaggttctcatccacatccactggagactgaaaaagaaaagtcagcagagtcagaactcagtaaggaggatgggccatccgaaccttagggctacttggcctttgtcctttatacaatgtctctgctgtgcctcttcagacacttagtacttccgctctttgtgatgtgtgtgtgttattattataaagattttacttttaaaggctgaataatattctagatgagtatagaacctgaacacaacgttttaccttcagagaattttgtttacaatatgtggaagaaagaaaaggcctagaagatggtcatttcagttaatgcaagtagagatattatgatggaataactctgtttcagtgtttatttgcttgctttttaagatacaccaaagacaaaacaatgtaactgactttaattgtcctctttgcttgattaatttattcaaaatttggagccaaataaatggtggtggtctgtagaccacctgtgcgcatgggggaggaggggcttactcacaaagcatggggaactgattttattcttgactcttctcatccaagtctctataacacattgaagaatttttttcttgctagcagttttttcttggacatagaagcaaactttggagaagtgtgcattttttttctaatatttggagtatggtaaagagtaacccaaggtgtgtgtgtgtgtgtgtgtgtgtgtgtgttgtgtatgttgagagtgaagggctttttttattgtctctcaatcttcatgttgttggagtgggtagccttgtttgactgcttctttcatctttgataatgaagcattcaagacactgaggttgtaaagggctggcttactgaggttgtaaagagcgggctttaggtttgatttattctcctcccctttaatggcacttttttgaagtatgcttcagcacagtaagatttgccacttttcagggtgcatttttgtttcttttgggaaatgtgtaccagattactcccgtcctcactactgggtttccaagattgctctccctgacagctcttcctggacaatgtgatttgctaactactagttcttggcccagagatcacatgacacaatgacattgagtctaacttcatcaattctgctttctaagactgtgtatgcatcttgtctttactatgagtgtgccctgtcctatgaactatgtagaaaggagtgcccagtagagaaaccatttcaccatgtagatgtttcccataccttgatttccctactttagttacttccacacagtgagccccaacctactgctgaccacagagcacaatgctacccatcaataatcattccttagaaccagccatggctacatagaggtaagaaaagatgggacaagaacacaggagtcagagagaagtacgtggactcaggagaggagggaagactggtaagccccttatttggtgtttgcatctaatatataggtattgtctcaaattaacccacaaaaacattgagtataacatatactcagagtctatagatttaagtagaaatttagaagtgtaattttaaaaaaataaaccgaccatgccaacaaattctattttaggtgatattcctttactgcaaatgaagaagatattatgaagtgtgtgtcttcatgtggcattttctcagcccagcatggtcttcttgccacagccatgcaacatgggaagggttgtgaaagctacagatgttatgaccttagcactgcaggctgtgtaccctcaaatgtgccagggcaggatggccagaggatgtaatgtgacaaaattccagtctccttgtttgcacctcccccgggtgctgtctcctcgtcccctacaagaatatcttccacatctagtaggatgaggtaaaaaaaaaaagaaaattgcatttattttaagcttgacgtttagccagatgggaactagcttaagtttccctggaatatatttcattttctccccctgtcaccatcctgtggtaaattccctctgacagctgataaaattcatattttttttagtgaatcaaggatttagatataaatatgcagagtgagcacacaaactgactcgtattctcaaagttaagggggtagggttggagtaacatcatgtaagaaaaattccaagttatgcaaaaagaggggaaaaatagataataacgcaaaattagatcccagaattcttccagttcatgagtttcagcagtctggggaacattctcccagagttgattactaagtctgagacctattttctcattaacttttagtataaaattggagatggactccatttcaaatgattcccccaaacactgaactaaaaatgaaataagtttaaaatcgggagtgttatgaaacgtgaagcttcagagtttagctcctggtagtgactcattcttggcgcagatcgtgaactcctcttctgagggagttcttcatttcataattgcagctgtggtgtggcccctgcccttggttctgctaagtccagatttttatgctgactggaggtgaaggagctgggaagtaatgacatgcaatctggttttgctctctatctgaaagtgggatttccagttctactcatttgatgtagaagcaggttctttttcttcacaattgacttgttgaatgttggtgaggcagggtgttggacatgtttctgttgtcctttggtagagccatggttggaagaaggaagagtccatggtccacagtagtcaagggtgaggcactcttctagcaccatgcggtgcaggtggtaggggatcctgttgaagctccatgggaggcaggagctccaatggtagagaactggaagagtcttgctatattaggctacctgggaaatcactgcataatggctggagtagacatcatgacccataggacagaataggcacttagtggcaaatgatccatcaaacattataaatgaagttgttaatatgtttatattttagacatataattattactaaattcaaactgtattcttacctcaacttgtaactatcatcgtgaagtcataacccaagtgatgatttgatatctcaggggcaagaaggatgtcttgaagggtcaagctttctacaggaaatttctgtaggaacccctcaaaatacctagtgcttaataggaatcagcaccctttttttttttttgtaaacctgcctaagtacgcttagttttgttaggtccaacagtgaacagcttaccacccctctctatcaggtcccttagtttgaaatgcattgtataaattccagccttacatgcattatgaaactacagaccttccaaaaaggcgattttctcacttattgttttactcaggcaggagttaaagtgcatcttcctttttggtgtggacctcctaattatgtattagaagaaggtgtgaatatgttctaggaactagctttggcaataagtatcatatacataagccatgttcatgtatggcattgtcacatgctagtgataaatgagtttctactaatactattccaaagtctaagcttgcatcatcttcctagagagggtttaagaactattcttcaagccacccctcttactgactaacattatttttcaagaacagaatggaaaggagtgttccttgaactggtggagccatgtttaactgcccaacttagcttttgcatgcaggtttgatttagagcctactggtgctagactatggtctatggttttaccccgggtacacagtaggatgggaccccatcaattccacactagtgcagctgataggtgccaaggcattgtgggacttgttatctttggcacatttcattctcttagttcagtattttctttcttatattcatgtgtattttctgggaatctctataactgaattttggattcttctaacatcaagcagaacttgaaccggtttacttatgaatgaaaaaagcatgtatggcattcatattccagcttatgctcctgagacttgtgatgaatcgtgtgcaaggtgagtgcacagggctgcattcatcagccatgtatcctctgtttccaggaaactctttaaccttcacagtgcaggtaacaggaaaattcagtcttataaaaaaaaaccaataggtgctttcaagctcttccagacatacagattcgatttctgctttgttcgttttgtgattatgtagttaatagagatggctccgagagaagcaaaggtggtttagtcttttcacagtctacaaccattatagaaattatctcttttgacattcacacaccccctccataagtgagagtgtattttttgtctagtgatgaaagggatactttaagcaattaaataattagaagattggacgtgtaaaggggaataagcatcatcagatagccatggtttggtttctctcaacctctgctgtgcatctgctttagacaccttattcaccattgtgccctagagccttaggccttttgaagaaggaagccactcacctgcagtacaggctggctgatctccatgctgattattgctgccttctcagctgatgtcacacctaacactgtctagtagatgcttccttccaaagcatgctacctccacatccatgctgagctgctgccttggagatccagttttatgtggccttctttaaatatggccaggcttgcttcataagtgcagctcatatgcactttgtctcgaaaattacccatataatttgcttccaactcctttgcactaatatctttgtaaccagacagaaacctcatggtttattgcagcatgcttgcttttctcatttcacagttgcacactctccctgcacacaaattcaagtgaatttccaattatcaaaacctgtcaaaagcttgatgctctcctatgtatctcttttataagttaaacattctatgctctaaaattgagatgggcatttgagctcagctttctctgttatcaatagctctttgagacactgaagcccagtgactgtagtcaccatggcttctctaggtgataagtccagaaggccctgattctaaccagtggtctgcatttgttcctatatagttactctctgtactggagaaaatacagttctgcagtgtagatattgtccttaaattgccaaatactaggtttggaggagtaggtatgcacctttgtgccacattgtcatgtgacagagcctacagtctgtctttagctctctgtatacttttgatcttcatggttggccatctttgaaggtcatagactatcatcttccaagatagcctgaatactgttcaagactggcaatgttcctttgcacatctccaccctcccctcacctaggaggagtactgtcatttccccaatagatatatattcagatgggagagcactgataatgattatgaagtttctgacagaagaaacaaattaacatcccttgcttgcaatacactgaggtcatgaaatcagcttacattgtctcaaaagagtatagagcaggaagtgcagagatccaggatgctgtcctaggggaacctgtcacaaagggccttggacaggaaaaagggaagactacatgaacacctatttgaggcagacgctccaaaggcatggacagttactacagagcgaggctagacatataccctgatggatgctagaaacctagcaaaaacagtctccaaggagaggtggagacagcagacagaatggagtgagactccatcatcataatccggactgatggaggctcctcatttcaagatagcatttcaaccccaaatggcaaccataagaggctaaaagaagaaccatcactagaagattagataagatgaaggatgaagggtttgaatcctaggagaggttttcttttatttttatttatggtagtacttgagttttaaaaccactaaatttttggcaaatttggtaaccagttgcaaaatatttgacagcttaaaattgccaatagtaggaggatttatgccactgaaactggtcaacacacttcacctctaatatagccatcaaaagctggtcaataaacactagtcagaatacggtgagcacatctgaaggcaggcagacagaatccatgagaaagccacatgactcaaagcatatgagagagaggtggggcccatgacccaaccctgaggatatggaaggagactgtactgatgtgatggaggaagacttctgagaggagaaaggacttttaaaaaagggaaaagaaactgtcagaggagaggtccaggatctagaatgataatgattatcaagctaacaaccctgagtacctgttatatgtgaaatagtgttcttcatgcttcccctggtttacctcctgtagcagccactgcacagagacaagtaacatcatcatgtactcatgaatgaatgaatagtcaggggcaaagacttgtttgcccaaagccccacagctgtcagaatacagagacaaggtttgaattccatgtaggatctgatgatgtagccgtcatacctaccatctgtgctacatcccagagaattagcggattctgtgccaaggagttgctttgggtttcctgatgaagatttctgtgtcctttaagaatgtagcaacatccccttagacagagggaagacaataagatagataatgttgaggcacttacgcatggcagggacatgggagggagtggagtgtccaagcagtgctaaggaccttggtgccagataggattttaaaggaatgaggagattccagggagagagaggtttttctctgacacacctcagctgctctgtttgggtatagcaaaagtcgcccagaagtcctctacttaggctgtgactgatcaaaaggaagttgatgacatttaacaatcgaaggaatcaggagaaaacaaattgtaattggcctcagaatctgcactgttgtgaaagcaagaggagtttgttgaacttaaaccttaaaagaatctggaaaatatagtttttggaagacttgaataaggagctaagagaggaggccagctttgaaaacatgggcactgtaatctatcaattttggggacagtgcagtttttcatactctccattcagtgtgtgtcttaaaaagcagtggatggaaacaatcatcatagaagatgagatcaaaggccatacaaatggattttacaatagtccagggtgaaaacagcagtttcaatgaagagaaagcctatgactatagatattttctaggatatctactattaaataacaagtcatttaagttctttatgtgatgctggcttttcaaacagcatttgcaattaaattgtatataaatttgttatatttttaatatatatatacacatatgtgtgtgtgtgtgtgtgtgtgtgtgtgtgtgtggtgtttagtactaaagttcaagatttttagacagatattattttgaagagttagactacatgtgaaacctgaaaatgcgtccaggcatagtgaataaatgctaagtggataatattcattaagttcgatcatcttccaaaggctgtttgctgattaaatacagtctctaaccctgcttgagtagtacactaggacttgctccaaggtgaacatcatcaatatgaatggcaattactcaactttgaccttcacattgcttccagatctccatttgttttcctgttctttccttgaaacctaaaagggggaaatggcatttataagtcatagtaaattacaccatgtgtattgtaacccctttccttcttgtctgggtgaaataaattcatgtcccttaccttgatgtgcagaggaaatgcatctgttattccttttctgatccctctgagaggtctgggctctcactcactaccccattccctggaggcagtgccagtcagagaagacatttttcttcctgaaaaatagccagcagtggattgtgaatgcagacgccattacccttggatcttctctccaagagaatttgctgctcagtttttacaaagctcaatctgactgtatgttcctatgtttaggagttctgtttccttatattctaagtgggattaatttttgtagctcatttgaccaggtccaggaggcaagctccgattactatggaaacagttaccaagtttcctggcttttgtacatttaatggatcaacaatgatgccatagtgacataaatatttcttcctcttcccactttcattttattttcccctttttggatacattattgttgaggaatgtagatttaatttcacagtctggcttatctgatctttgggtattcatccagggagagattttcatgataattacatgaccaaggaatgcatgtgtctaaacattacttcccaccgttggtgcaagctttgatggacttttcagatgtgatgagactcctgcagaacggcagggagaaaattttcaaattcacactatactttgatccttaacttagcctcctataccatggtaagtgaattacaaatttaaattttgtgcttcctcattccttccctaaaactgaaaggcctgtaatcttgaacgtctatatagccatagattataattggcaaaggagtacttgcgttgcatttccaggccatgtaatctttaccctggcatttgcatattaatagataattgtaaaacattatgtaaattaaacatggtggtgaatatattaccaaatcaaatggcctttaggggtaattacaggatcgtactatgtaaactaggatgctgcaggttgaatgctgaacatttttcataagatgaaatataacccaggcaagatatttatttccatccagtcatgggttttccttttgagtgtgactatttttgtttgattaagcacatttagggtcaattcatagaattgtaggaactcatagtactctgaataaaaggtagaaaatatattttttggtagtgattattccagatatttgactcacagaggcattcctacaaacactaatggttttcactatccttttgaatgtaatttttatttttctttgcttgaaaattactcactcttattgttttatcattgtatgagcaaaccattcggtctcctttttacactgtcagtccatttttgctactgtagcataattcctcagactgggtaatttctaaagaaccgagaacagagatttgtttggcttattgtcctgaaggtttgaaaatagaatgtgtcattggtacctggccaacacctttgtgcttcttatccccagataaaannnnnnnnnnnnnnnnnnnnnnnnnnnnnnnnnnnnnnnnnnnnnnnnnnnnnnnnnnnnnnnnnnnnnnnnnnnnnnnnnnnnnnnnnnnnnnnnnnnnnnnnnnnnnnnnnnnnggaagagggagagagaaaggggggggtggagagaactcatgcttttatatgagccatgctggcagtagctcagaaatgatgtcatctctacctgctcacctttcacagttcccacatgccagcatagactacagtaggaattaaggtaggaattaagttttcaacataggatttttgggggactgtgttaaagctagagcacactgtcttgctaaataacttcttccttttctgactgctcattagtctttctagtctatgagccccatgcgctgcttcatcatcttgttctccatgagtctacctccttatccatgctatatatggggtcagggacatgcaggaagagtggggaagaagggaggaaactggtcattttcttcaaaccttcagtcaaaaagatctctttagtacatttctcccagtaaaatagttatatgagttttgttactcagtgcttggggaggaagcttctgtatgcagatatttcctgttattaaatggaagttcccaagccagttgatcttggtcattattttagtctgtgttttctcctcccttatacctcagcagcctgcttcttcctctcctgcattattccagtacagtgcccgccctcttccctccttcccctctctgttcatctaagtgcttctggtttaccatgtacctggtgttactcaatgacagctgaatgtagcagattttatgctaaaacaaacctggtgttatggcaaatagctcccattgcaaaaccacagtataaatattgatcaagtttaggagagaaaaagattactcattgacaaaaacaattatgtcctttgaaatctgaatctcagactgcagagtgttggagtcagaatttttttaatttttaatttttaatttttttttttttttttttttttttttttttttttgtctgtcttcatacagggttccagtcaggtggactggagacctggttcacgtgcttgaaaaaaaaatactgcttggtttaattacataataaataaaataaagacaataacaccctttcataggcagcaaacttgactaaaaaaaattatgatctggttcacttgttctagactgctctagaccttataaccaaaatggaaagcaaaatgctcgttaaaaatgaatcctcttgctttctcaacagcagccccgctctgatgcagtagtgtctgacgagttactaaatttaagcttttcactggccttattaacatgtgtgataattaccgaatcagggatgtgtcacaaagatcaaaagtaatcagggagcaaagtccctaacaacagagggcgaggtccatactaggtgttccgtgtatgcccgtctctaaggcctcttttcttgttttcacgcccttcctccaatggagtcatagacatgtcaaacactgatgattgtcataaccaaaatacccaaaggtctgtacctgcccttaggcaagtcatttatttattattccttcccccttctctctttccagcttagatgtgtaatttgaagccagtgggaactaatgagaaaatgaaagtcgttgttaccattattgctctggtgccatgagatctctggtggggacatttgagggaggaaaaggataataaaggaaaaaagacacctgcctagatttaagctgtgccttctagggcctcccgcacataacctcaaagctgcatttctttaagtaggagttaaaggcttaatctccttgccattagaaataattcctaatgattagcataatagcaaatcatttctgcgccctgtgagatactattgatggtgttttcactgaaaatgcagtgaaacacagaaacggcttctgccgtacaatgaaagaggaaatacaacagctaattaatagtccgtgaaatggtttctattactacactctgcaagtctgacacacatattattagttttccacacgaagttgtcatttttttttacggtattgtatattaaaaaagagattcatagtctatcccttgtactcttgtgttgaagtcattttagcccacagccttgatgagagctacagcagacaatcatgacttggtgtcactcaccatctgggctttccccaagagactccgtggcaccagagcaatatagcagtgaaggtgcttttcatattatcgtttgctccctctggttccaaattacacatctgagctggtaatagataaagaggaaggggcagcgaatacataacttgcccaaggacagatgtcagtgttagatgtgtttttggtaccacctcaaggggatggaaacaagaaaacacacattccgatatggacaggctttgaacatctactgtggtaggattggattagaattacccactctgggtttgttgagagaattcgtcaatgtggaagaagaaaaggaactgtcatatcaagaccagtgagtctggaaaagttccaacatccaagtctaacttcaagctattgccacacagagactttgaatcacctctaaagaccttaatggagccttggagctagtgaagagcatcttgacagtaatactaggacaggcaggactttaccctctccccatggttcttgattctctcatagatcatatatgtactccctgaaagtaaggaaacacacaagtttagaacagccacgggagaaatccttgggaggtatgtatgaggttaaactgttaatgctggactttctccagtgaatctcactcctagttaccactcatgctgtgctgccaccctagatctctcttaatgcagagtccggaacggaggactgtattttcctaactggaggtgagcccttctcaaacttttggtggtgtttaccatcatggtgtctacaaaattatgttctaccagttgttagcggatctgaggatagattggtaggactccttctatcccgcctcttctttcctactcccttctggctgagtataacacctcatactacagagagcagagctgtgtgcagtggactggagaagaggtagtaatgttcttaaatgaaccatcaaatctacaatgaaaatgtaataagccagctaaaattctcctgcatttttttttcttaaattgcatgtctgttgctttgacttaagtggtacctactccagtagacaatttatatggaagcatcctggtggactgagagaaagtgagatgaggacttgactgcaacactaaggcagtttgcaaagctccagactgaagccctggtggcctgggaaagaatttgtagtcagtggcataggacacatagataatgttcctacgtacacttatgcatatgcacaggcatatgcgtgtgcatgtctgtagaacacttcattttccattccttttgcagcacttaaacactgattggaactgtgctctgacatcttcctagccatattcttccattaatttgatcatgatagacaaatttttacttgatgttgttcgacaaattaaaaagttaattgccttgtcggtagccaaatttaaaagaattttctaatctgaaatctcctcagatagagaccatttcttaacagaatcctccactaccaatgttcttccagcagcctctatctatgtgaaggttggaaatgtgaagagaaacattcctactgatgggcctaagaggcaaattcatagtgggtgcatactcatccatccatgcagatgtgtgggtttcagaagctgaaacaagaggtgtgctcatagtgggtgtgtatatagctgtgaacattcatgagtttcagaggctgagacaagaggtgagctcatggtgggtgggtgtgcacgtacataagcatcagaggccgagacaagcttttcctcttctacagtgtttagtttgcatggctgatgtactgttgctgagctggatacatctaaaagatgaaatgatgaatattttactgtggaaaaaggtcaggaaataattttttggtgagaatcagacaaaagcctcatggcttgagacctgacttagacctccaaatccttttgccatcatgtagtagtagtgaaagcagaggcacatctcccccgcacagacagagtggtacctgtcagatgcaggacataatggctcctaacactttcttttctttaatcctgtgaagctaggttgtggcataagagactgttaaaatttatttattttaacagtctcgaaaaaacaaaaaaaatttttttttaaataatgacaatatgcagcatgatataagtgattttaacttcttaggggtccaaatgcaaatcccatcaaagaatgtataaaaataatataatactgtgtaaaaactctattggtaatctaattttcttcaaaatggttataattaatgtctgtcttattacacgcttgtttaaatccatttaccagtcatttattaagtacgatcatttcccttttccctgtcttatgaacataatactaaaagcaagaattaaatatgttttagtatttaccatgtgttggaaagtctgctaagaaatgttgcatttattatttcatttaattcttaattcatcttatgaaacagatggctaccaatgccatctgaaatgtctcccagaggctcacatgcccatgaattgctgccagtctgtagtgctctggaatatggtagaacctttaagagctggggtctagtgagaggacgttaggccgttggaggtgtgcacttgggagtgagatattagaatccagcaccctttctctctatttaatgctatcatttgcttataaacaaacaaactagattaaagaagttcattttatgctcctttgtttttgcttgcttgttttgctttgcagctctggatattaagcttagggcattacacatgcctgaccagcactctcctactgagatatatccaaccgtccctgtctggtttcccaacaggcacggactctcaattctgaaggcctgtcatttggtttacaatgttcagaggagctggatttgttatgagcaaagtggcttcagtaagaattctgaaagatgatgtgctcagaattatttatctcattgtggactgatgcatgaaaagatgccctggctctatgcccctgtcaaagaattcacttagaagaaatagtgactgtactagctttttaatcgctgcatagcttccctcctgggtacacaggccttgtaaagaattggttagaaatctatagtcaataaaaaagcttgtgcttttaaatcatttttactttacgagcagaaatctttccacaaattttgctagaagtaaaatcttcatgaaaaaaatcaaagaaaacaaggctacagtaaattgctttagtttttttcctgggtaggattatgttttacatttttattgtttctcccaagcatgaatgtttaccaaatattttatggttaattggttcctatctaaggttaagttcagtgttaaatcgcgatgattacaggaactgaaactagaacatgagggatattctttcagttgaggcttgagtacctcaactttacaataccaactttagaaagagaaaagtagcccacttcccgtgtccattcataggtaggttgcatcattcattaaaaaaaataaaataatatgagggcctgcgctgccactcaccagggtccaagccttcttctggtaccatgcttgtgaaggtaagataatacagatttagtgatatgagaatcctcaggcagtcccttatctcattttatctcaatttattcatgttatcttagcttagcttagaacagagaactaatgagagatttcacctgatggagggctggggctaatatctgttgacatcatcccataaactggttgtgcagatgggtagtttgagactgtcgttcattggtttctgggaggatgtctgggtagtgagatgctgggggatagggaatcttaattgttaatgttttagctatagtttcatatacatatctgcaatcccagaatctgccatgacggtcattccagaaactttttttgggtgtgggagggggcttctactgtgttagcaattgctaaaagagaaagcaagtgaggctacaagaaggaacctgttcaaaatcatatagcttagttgaggatattgaattcatgcagacctttcaagccttcaagctgtattcttgatagtattctatgctacttatagtattgatggtattttttgatatatatttgagctttcttataataatttctgtcgcattgtctataggaaggaccacgtgctcatgttcatttcagtgtccattgtttatgttttgggatgggttgaaagtacacgttgatgtggctgacagggagaggagggtggtctgggatgcggaatgattaactccttagaaatccatctctggttgctgaaatacactattgtttgcacgcagtagcattccagataggacaagaagtgttatccatatgctcaagtgtgcatgaatggctgggaagatgtttgaatcaaagaaggttgcctttttacattaacagccagtggaaacaaaatctttttttttaattggttattttctttacttacatttcaaatgttatccccttcccagaaaccctctcccgtccccttcctcctgcttctatgagagtgttcccccaccaaacctacccatttctacctccccacccttgatttccctacaccgaggcatctatcgagccttcataggaccaagaacctctcctcccattgatgtctgacaaggccatcctcttttacatatgcagctggagctatgtgtactccttggttggttgcttagtccctgggaattctggggggtctggttggttgatatttttgttcttcctatggggttgcaaaccccttcagctccttcagtgctttctctaacgcctccattgggggccccattgaggaccctgtcctcagtccaatggttgggtttccttgaagttgggagaggtacaggagctggagttgcttacccagtgaagacctcttttgagctatttatataaacagatatataagtgggtgacaatctcaaaatcctgctgcaaaaataccacagactatagatgaagtaaattactccaatttgttggacacactatgagtaaacacaagtgcttaaattgccttgagttaggattatgtaaaaggaagacactctcagcgctttactaaagtagcaataaaacacgagcacagttggcttgctctcactcatctctaaacaaaatgagtccttgagcattcgtttactactttattatggcaaatgtcatttccgttcttgaagtgaaggatttggatctataacctcctccacaccactcctcccagatatttgaaaacaaagcctatgtattaagcatctctgtggtagactgtcaatctgtgtgggtgtgtcagcaactgatagtagaggttatcttcacgctctctaaaggtggatttttttttaaaaaaagtccatgacaaaattttaaatggattattggaaaatctaatactggatgcttatgaaatgaacagacaaacatgtatggaggagaaacatcttatgttgttaaagtgtaatttcttctcaaactactctattctgtgaaaaatattaacatgatgaaatagacaagtgaaatggtacatctagatttttagcatgagcttgtgcttgaagaatttgtaagaatggctctcattggctgcatttcctttatgaaggattgaaccacaatctgtatgaaagcatgcagattgtactcaacagctttctttttagaagactgacaaatgaagaggggagtatttcataattaaagaactttaatgtcttcatagacagaagctgtgagacaactgtcaatgtaatcttaattgtgatgaagttaggtactgagaatgtatgtcagttgcaaagggagagtacttaggagtctctgatcaatattcttggataaaaatactgagaattaggtgataattcattcaggccattatatggaaactgactattgagtaaaatcactgaaataccaggcttcactcatagaataagttctagatccaagaaggcagttagtagtcccattagaactatacgctcctcacaccatagttcagatattaggaagcactctggggtgtgcagtgtaaggaaggaaaaaaacgtttggaaaagaggaaagtgacatatcaaagtgaaggcactttcaaggtgaagactggtcaagcaggagcagaggcggtgtgtgtgtgtgtgtgtgtgtgtgtgtgtgtgtgtgtgtgtgtgtgtgtgtgtgttttgcgttggcgctctccttggtactgaacagaggtgaaatctttcaagaagtctcccaggttgaagttcccttttctttattctcactctgcagcagttgagatcacacctcttgctctgtcatctgcctccacgttacggtatctaaacacatagatggcatcctcatgcccagcctctgataatgctgcatgccttgccttaaatccagctgatccttccaatttgtatttcaagaaagatgaattgtgaaagagctttgaggggaagactcagcacaaagacagcatatttgtaggtctatattgacttaccaagcaattgtatttattataaatttaaaagatgttgcatgatatatgttagtggacctactcattacagaaatgaaagcaggtatgatagattttgcatagggaagataattctaagggcttgatgagtcactgataggttaggtataagaattatatttctcccttatgcttttagcttaatctcacatatgcaaagcatagttattggtgacctgaatgtcaattctgaagcatgctttgcatgaaatgaaatatctttgaataaaggtcaccgtatgacaacttagaagaagtacattgacagaacttctttgtaacaacactaatgataccctcaccttgaagtggcagaatagatagctcagaagaagacaggaggactgctagatgggcagagagaggtgcttctgctccccccacctcccactgcagctcacaacagccagagggaaattcaccgatgtaagcattacttctgtgaggacagataactggcctgaaatgaggtagaccttgagagaagaaatcttggaaatctcaaaaccaagaggtagggaaaggagttgctacatgaaaaaggagcatggatttctttacatgaattgtatgaaaaagagaggacaaagagagccatatttagtgatacttaacttcattaaaaatctgcgcagaagacaggccatatcagacacatcaattatatagccagtttttaatgacaaactccatgagtaaaatgttccccccaaaataccgtagtacttataactgatggaacattgctacactcaattatacaattagtaaacatttcccacaattcatgtgtgcctaaggaaagtaatctctttgaaataaaggaggaaaatataaacaaggttcagaaaataaaacaagatattcatttctccaagttcatcaaatatgattctatgattagataagacctttaagtaaagaactttaaaagtgaaataattaatgctagttcataatttaaataatctcttaataactggctaagctcaaggtcagatttgtattcctataaaatgatccgaattgggagtagtcactgaagaagcagctcagtgattcactgattgtcttggttcattctgaaatattctccagggctaaggtatccactggctctttgggtcatatttcacccagcgtgctcaggaggccaagtagacagagtctatttctctttgttttcttgtccttttagaattgcagttctttccaaagctgttctgctactcagattctcacagacagaaaacaatattcagtccttggtttcacagaatggctaggatcaagccctgtgttcattctcaaggagaaaggaagacacacatgtcaaagaaagaattcccttgggaaattccaccgttgcaacagggcatcctcaaagcaaacgaggccttctatctgggctgtattctgtgctgaaattgcctccctggacagcagttaagcagtaaaggtagactacatatcaacagcaaatgtttgatttccttccactgaacttcagacaagtttgtgataaaacattagtcagcctctgaacttggtttctgtatctgtcaaaatagggtatttattttactatttttaccatataagtaacacaatgcagtgtttaagctactcaacatagtgagctgttacatttttataccttaaggtctttgcatctatcagtgatgaaaatgttataatgtcatatcagagggcacagctggcacaatctagagacaattgcaattttaataactgatgtagcatgtaaatggctaagggtcaggaagaccttggacattctcaggcacctggacagtttcccctaaacaagcatcagtattattgaggttgagtgactctggtgtccctcactgaaacaatattgtcaggaaccttacagtgtgataatttacttttatatggcaagcccagtgcaataaactagaaggatgtttgcaaccaattgttatagcattatttcagtgaaagttaaaaccattgtgtgtgtgcttgtgcatttgtgtgtgtgtgtgtgtgtgtgtgtgtgtgtgtgtgtgtgtagatttcagttcctcagccttgatggccactttgatatcctctcctttaagaatttttaaaaaaaaatcattattttccttccaaaaacatctataatacctttccttgtgatttttaaccaatagcctcaactaatcacacaaaggtctcttgctgatgaataggaaacttcgggtttatagactaaaatccttccactttatttaggaaaacacacttgaactatgaggtggagatagagtcaggaagatttatagttgtggttcatccagaatttccttacttggaagatctgatattcttgtgtattaatcccatagggagcaaatggcacttggataccttagcaacatctgcttccttgaataaatgttctctttggtatgttaaaattcttgccagtcccatggaatccaacctcttgttcttgtctgtttagaaccttttgtggtcactccatctctcttgacagttttaaagctcatggggttacataaacatgagtcaatatggagaagaggctgcaacaataaggtaacaacaattaatgaactatttctgtctttaacaagcttcttttttctcctaaattagtctataaaatgaaatgctaggtcatctgtattcagcaggcatatactgtagccagtgttaaaagcaggggacagaaggtgagtgagcccctgtagacatgtacttatgtggctccactctggctctttctcctctgcaaactagataagcagcagtagcagctgcctaagatgaagtacttttaaaagcctgctgtttgatttatccttgatatagtttcctttgatgagaacccatggcttgtaaacatagaacgaagttcctgtttcatcatcgagcacgccatgacttcccatcatctcccagactcttccaaacgcttgaaagaatcttgcaaacccatttgtgctttgtcctgggattgtttagccttcccaggttccctgaggatcagaaagtgaatttatggcagatgttacaattccagaaacctccttgatcttccagaggtctgcttgttggtctgagacaatctgacacagctatgtgttgttgccttgcccgatccctcggtgagttgcaaagcatcaggggtaactgcagatgctggcaatgtcctttgattgcatcactctttgatcccttttgtcttgagttgttctcatcattcctgttcactcctttgattgattcatcagtagttattaaatatcaaaacacagagttccaacccctggtctaatgagggcagtcacagtgggattctttcctaatataacccaagaccctggaaacaactctgagggggacatctccaggctgtcactcttcaaaaagaaggtcactcagaggggcctgggcccttccactttctctcacattactaaggattccttgtgggaaaaatagaattgttgatctttctggttgagttatctatgttggtgtgacttctaacaaacctgattttgtatctatcaaatcaggttttctttttcaaaagctgacctcatgtagccttaaaattgtatataattacagggcagtaatgcaaagtctatagtttttatgctgatcagaaaatgcaggtggcaggaaaagagcagttgactctagacttgtttatatttggtaagcaaggaagcttgggtcgatataaaggcgagcataacagtaaaaagctcagggctgcttcagatgggaggagggtgtgtgcatggacattttgcactaagggctgctgtcagtgagactgccatgagctggagagtcacagggtcagagccagatcatggcagttgcaggaagtccacagttctacacggctaggctactcagagcccccgagaggggaatgattctgcatctcatagccatcatcaagaaaactatgaagtatgtgggagatgcactctacacttcagtacagcacagcatgtgagatgtttatggctgtttcacaatcctcagctactgtagggaatctgggaaggaggattagtgactggtggccttttctcctgtcctttttctgagctgagacactgcactgatatataaaaagatacactctctcctcttaagtgattcttaaaaatatcttctacataaagtttcacagggaagaaaggaaaaagaaattgctgttgagcaaaagcagtgagcaagaagcagaaaaacagtttgaaccaatagaatctggggcaaagggaggtggagaatttgggtttgtttgttttaataaagccacatcataagataaacgcaaaggtggtacagagaacatgcgtttttgctttgattcactactacaagttaatttgttacattttctatcatcaatacatttgttatcattactaatagccacattaagtaaagtcatactcagtttgtatgtaattcatttttcctggtcttggatcagtcactgatttacattcagtcccaggttgtcctgtgagtctgtggatcaattggttattctttccacagatctttattgatcctgctagtaaagcattcacagcctcaccctgattaataatagcacctttatcccagagttcagctgcaaatcctagcaacacatagcacagaggcggcagagctcataacagtattaactgtatttgtgcacaataatcatagctttatttttaaaatgtatacgtgctgcgtttatacctattttacatgtattttaaccattctgttaccattaaatattttgatgcttaaattcaaaattagtttgtatccatagcagctgatatttaactgaaattcaagaattaaccttggaaataaaggaccaaaaagatgtgtgcgttctctttttcctaacttgaaggaccctgtatccagcataacattaagaatgcagatgctgattatagaataatgacacatgtatgttaacagaaagagtaaagagctatacccaattgccagctctgcataacccagaaagattaacattgataatgtttttttaaagatttattttatttattatatgtaagtaacagctgagccacctctccagccccaaagatttatttattgttatatgtaagtacactgtagctgtcttcatacacaccagaagagggagtcagatctcattacagatggttgtgagccaccatgtggttgctgggatttgaactaggatctttggaacagcagtcagtgctcttaactgctgagccatctcaccactgataatgagtttcaatgaactataaaatcacgaggagtcatcagatgaattaataattgtaactttttccacccaagaagtggtattatctctgcagtaagcttcaggtatcatccaacaggccccaggcagacgtgtggcgctgctatcacaaattgctcgttcttctatcgggagtgaacgtctgcgaactcatccatgtacggtgggtaacattaggattacacagtaaatggctgagagatgggacaaaaccatctatgcagtctgcatcctgctctgttgtgctgtacatagttggcaaccagagccagcaagatcaaaggtacagtgcaagggatatatttgggcatagcatggtcagacaggtcttggtgatgctgtgacatctattagggggacagaagagacagaggaccaagcaggaagatttcttagaagccattgattctgaggtccccagccatgtattagcatgtacagagtaagaccagaagttagggtgggtagaggcaaggtggggagatgatgggtcaagaccaacttaaagattggtcttttttttctgagtaagattagaacattcatgaggcaggatgtcagtgacatcattttgtccatattttaaaaggatctttttggcttcattgtggaaggaaaggtaaacaatacagttaggaacccccatgggacgagaggtaagacagtttggttttaggtggtactggcaggatttaaattttacctattaattgtaaatgacatttgaggagctagagatgcttcaaggtctttgatcatcttgcttaggaacagggaatagatgaatgctgaagaatgagaatcaaaagtcctgttcctgatgttgaatttagaccctcttaatggagatgttggcaggcaagtagaggtctgtacttggctggatggagaggactcttgatccatgggctcagatgagagttcattacccaaagaggggatgcaaatacaatactgcccttcaggttaagggtgggaggaagagtcagtgacatagccaagcccagtaagagcacagagagagggagagattacccacctgcaaagagaaaggtgattgttgcttcaaaccatggcataggcagagggaagcaggactcaccatatggtttgcaatatagagaccatgggaagcccaggacttccattttcaaccaaagatagcattatcatgggcctataatgttgcaaggattaatatacatggaggctgtctgttgacatgtgtaatgttgcagggattaatatacactgcaaggattcatttataatagagctaactgttggcatagttagtgttccgttcatgtcatctgccctaactgggtacagttgggtgatgtgcactctaagtagcctcctcggtgatctggaggcagggtaggccattgctgtcatagtccttgttcataagtgatggtgctcagagaccccagagcctccctgaccatttcaaatcagcctgaagaggcttattataatccttcaatttaagaatgggtggatttcagagtttctcctcttgaacttgtttaaaattattttttaagaatgtgagtagttcctagtccatgtttgaacggaataagaaagaggaactctaacattcaaagcagagccctgagctctgtacctagagcagactcctgagccagccttggggccctctgtgcaccttctccaacagctgtggttggaaggagttttatatttacatgttcctcaatcctgattatgtgtggagtcactggagaccattaagacaaccctactctttgagcctcactttagttttctgacttaacttattcagcattaggagcagatatagatagcaggatgactttttaaattaaattttttgacatgtaatttctatacaatgctatttttccctattatctgtggttgagttctagcaaatacttatgtatgcagacaacaacatcacagccaaaattgaggcccttagtgtcactacaaacagccttgttcaggttaccctgggtcctgaggaccactcctctatctctcttcttggggcattagcattttaaaagggcatgaatgtgatgcaccaccacgaagacagcctttatagaatattagtgtgtagtggatgaaagctgctgggttttctataatctaagcattatgactgctttatgatcatgagttaagagaagacagttctactcttgtctggtggggctttgttttagcatcagggttccagggaaggaagaaatggtatgaatgggaaactccaaggtcttgtctggacaagttcaacctcccacatcagccacagtggacacagtgaaggcaccatgtgtacatgaagtggacacagtggagaatgatgagcgcaccgtgcctgcccaaatgagactaatttaatgtaaatcaagatgggcagttacaatcaatacattcagaagaaagattaggaaatatcacatagaccttcccctgaataaaatgactgggaagatgtggggctacttgacatttggtggctcaggagaggtttctttgtcctctttaagctaagacttgaatgtctcaaggatagcagccatacagaattaaagaaagatgtcagaactcagagtgggaaggcttaatactgaaaatgggatttgtgagagttcagaaagaaagaaagaaagaaagaaagaaagaaagaaagaaagaaagaaagaagaaagaaagaaagcaagcaagcttctgtgcatgttgaagaacaaaaaagggggtggggtaagtgggagaggcaggcagaggtcacctctcctggagctctgagaaccttcagggtgaagagacatgtcatccaatacctgaaaataatgtgtctgctgtgttaggaaatatgactttgggtactatgtggaaaatatgctgtgggagattggctgaaaatgaaaggtgtccttaactacagctcagtctgttgtaattagatgcaagaataaatatagatgtaattactcataaaggtaagtttgctggggaaagaacagtcaatggtgccttgagagtggcccttgggaggctcttactaggtcccacacctagttttcaaggactggatttattatttttatccagaaccctctcctacgttgtcctacatacccagtgctcctcttacataccttctctagtgcccctgactcctttgttttcttcattacagataaaagagtgggcctgagtagtcactggaggagtagttatggtgctggtagggtaatgcatccaggccaagggagatggcagtggcctaatggaggtgctttagacatgagttagtcttatttggcctggctgaagatggggtggggtgtgaggcatgggtaagagtgaccaaggtatctcagattgaccatcttccatttactggtgataggtttccactgtcctcactgcatacatagaacctacatcttttccccatagagttccactgactagctgagattccagctttctggaaccatgcacaagagcctacatctgagacagcacatggcagttgaccagcttgtctttggattatagtctcctgcaaataaacacagggagggagacatcaggctctgggacttcttaatgtctagtacattaattgtgttaaatgtggaaatctctaattaattactaccataaatgtatttgtttggttttgttttgtccttgtttttttttttttttttcttcaaaagacacagcccttcatatgacttcaggaaactcacattaccagctaatgtgcaactctcttaaataaaactgagctgtcaaaaatatgtgaaaacaattatatgtgttataaaacaaaaatcacaaatctctttattttcaaaagtgtaattagctttgtgtattccatccaaattgagactaaaatccaggaattatgtgatcatacctaaacactcagtgagcagccattcattcctttgtagtccgctcctaggcgaggctggctttcctcctgttaacatgtgtgttgactgtaagctcacttgtcagcttgatgctcgtgttttctttgtcctagttttaaccaatattttagaggatacaactttatttaaagatattcatagatttttaaaaattaattttatatatttttattttatgtatatggctgctttgccaacatgtatgtttctgaactgtgtgcatacaatgcctacagtgggcaacaaatcctccggaactggcattacaaatggttgtgagttgttatatggatgtgaggaacagaacccgagtcctgtggacgagcagccggggctcatgatcactgagccatctcccctgccccaatacgcacatattttaaacatatgtaataaatcatcatgttgtctctgtggccctactttccaagcagcatctctaacttttatcatgcttgctgtgggtatctggagatgaacccagggaccacatttgcctgaagtagtggagaaaggcaatgagcaatacacacaatacaaggaagaaaatattcactagaaaatgacttgcacagaactaagtgtaagcacaatggaagactctagccttacagggaaggcctgccacggaagcctcacacagtcaactgaggagcccttactaggtcatcttggtaggcacagaccttcctgtttatatttcagggtcctgaaatctgtccatgataaatatggccttcagaagtctcaggcttatggctataaaatgacaaatggcagcattaatcttcatgttgtttctttcccctatggtcattatagggccagccaaggtcagtgcagcaatatgtcccaagcacaggttttcttctcctttcctgcagagtgtcaacactacctattatatgtacttttgttcacatgttcccaaattcccattccagtatagattttagagtttcggagtctcaaatacacaaacataagggaaatgtgtctcttctgtgtggcatgcagatctgctatgcaggctactgagcgtcacttgtgtcccttcactggtacaaacacctgtaataggcaagaagtagcaaggtatggaaaacattcactacttcaaatctgcaagtgctctgcctctggaaaaactggagacagtgtcatcatctgtgtgaataggaaagattcatcacccataaaccgagtaatcaacttgggacccgtgccactaacagtcacactgctattcacattgtgctttctgtctccagtcctgttgacataattaagatgtcctttacttacggaattattctctgtcccgcctgcattcttcaagaactctttgtacagaaccacagctgtttatgtccctaataaattcaactgcacaaccatttaacccagagatcgatgatggagaaaatgatcctacacaatttctttgaggatgatttcatgattttgtatatgtgaaagcttaagagcatgctgcccaccacatcatctcctactctcaagggctgatttaaataggaaatatgttgaaataggaaaaaatttgaaattcagctgttcacactagaactattacaaatgttttacacagatacacacacacagacaaacacacccatcatcatagaaattttaactgggcagcagtatagtataatgccttccctaaatgaggtgaaaaaaaatctttgaactttttaattattttggatcagtgcaagtgcatacattacttgttaaatctccatggtgttgatcgatttgtgccataagtaaaattcacaattggatttgtcaagctatgtggactgtgaatgttatcaatacttaggaggaataatgaggtatagttggttactgtcagctggactcaaactaattggaaaaatttttccaaaaggaagtcatgcagggcaggcatagcactgttgcttgcctatgtctctcatgatggtgtagaatattcctctaagctcatacagtggctcttaacacttaagtagctacgaaatcaaatggccttccttgctgtctgcttctcttcttctgtgtacttatgcgtatgttacgagtagctagatattagtgaatttgttcttcgttctatggagaaagggccagacatggtgctaagcatctgtctatgtaagtcagccggccccagagcgtgctgctcagtgtaaggagcctacttgagtagaagcagcgtatctcttttgtcctgtcctgtgaccccaagtcagagtgataacagacttttgcaggagagaaccaatgtgggtctctgtaggaaaaataccagtattttgaagcaaattaaaccatttaccatagaccactgcatgttataatctttgtgtcctgctcccttgataggtatatgatgctgagtgccatctatttgtcagcttgtgtagatccacatgactgctcacgtgaactaaactgtatttgtttatcttagagcaattcttccttttaaatggtatttggaacctttacatttctttgaagataatatgtaagttccaggtgtgaccaagtgctacaggtccttctgtcccatcatccttcactcggtgtatgagttgaaggacagatccacaggacaatggcctctgtgtatggagactttgggaggtaattgtcacaggtttagatgaaatcaggaagagtctgaccctcacagtgggattgatagagagacagtgtgtgttctctgcccctctccatcaccatgtgaacgcacagcaagaaggatgctatgcatgggatgaagaatgtatatcagtggtagaatgcttgctgagctgaaataaggctgcccacgaaagcagctatctccaagtgaagaaaaaacctcacagccccaagcatgctgtcacgtgaggctaatacaggacatctaacggcatgttagaaggaagtttccaagcaaggaagaagcttgttatttgttcttctatttcaagttgggaatgaaaatggaaagagagttctctgagcattcaaagtgcaaatggcgtttaattttcaggaagaagcagcagcgtccatgctaataaacaaaggacacaaaaatgcccaacccacactaatgggagcatcctttttgacaccagtgtggactcaattcttcccattcaaaaccatctaatatcaagacagtagttctgggggcgcatggaaagggcacagcctggatgcagtgccagggttacagacacctgaaaagatgggtctgaaaggagcagcatccaagtgtagaatgaacatggagctgtttggaatctgtagcacataagataagagccaagtaagcatgagaaaagtcaagaatgttaagcagagagacttaggatccaacagaagggatggatatggtgaaggtgacatgaaggcttcagattagagattctccaggcacttgtgatggatgcttgtcttttagctgtggcgctctagtggaaaaacacagggccatgcccaacagttaagggatgtgccttagtatatgggggccagaggtggccagaacagtgactctagtctaatcttgcttaggatatagaaggaaggactgtgtggttagagcaaatgggccactatagcctggtttaacatttgtgtatgttagggcgtggtaacgaggaccaccattctaatctggctttgtgtgtatcgaatggtggtcagagctttatgtctgcccaaacctcttgttttggcagtggcagccagaagatgtggatctagtctaatcttatatatgatatggaatgtactagtcagagaaagtgggaccaccctaacctggggtaggatgtgaggaatagctgtcatagacagggggttcctatgtatgtacttaagctgagctgtggtcactggagacatatgctctcaattgtaatttccagatgtgtcattcaaagtgtctgagagatatttgtctgaatttctgaggatcttttttttttcccaacactaacctttctggaagctttacctgcttacaatagccatgtcttaaagtcagccattagtgcctctgcatgtgcatctgcatatcatctatttagacaaactaatccctcagaatgcagctttgatcggtgaaaggcctggccagtggatatcctgagtattctgtcccagaaccattgccccgccagccagttttccaaacgaccttctgttttcactgcttactgaatgtgataaacctgtattgttccatagtccagtttggtgtgggacagtcgaccatgccaggaggcttggtaaggtagagcagatctgagtcctcagcacccagacatccaccaagcagctccctgctccctccctgccagattccggtactggaatgcatgccacactccctttgttggtctggtagtccgaaacacagttctccatgttaatgaggtatcaataggccctgcaggtttagccaataagcttctcttcccagacatatctccctgcaaaaggtatttaatttctggtccaccctgagaagttggtatgcatccattttccacgatcaacagtcaatcaacagtgtggataaacatggactgccccttccatcagagcctctgtggggagcatggaggaagcctttgcctacagagctgcagcttcagtctcctgtagaagacctctctgtgcttccagacacctgctgctacctttgctgaagcccagtacccaaaggcagggctacaggcagacgcagtcaagcactcagtttcacctccccagcagagtgtcccacacctccatggtggggcagacatggacctgcagtttggggcactgcctcatacccttggctgcagagggcaacagtcttcttggtggctcagtcttataggtgagtgaacagaatcgggcgaggacacaggaagggaatggttaatcaggttttagatgactcaagggaggaaaatgcaaatataaatgtggactgagctttttaaggtcattgaaaataacaggaagtcctgtgtgaccctcctgttttaggaaccactggcatcagatacattcccttgagaaaccacttcactgcaggtttcctttggttaggacacgaaagggcacgttctaccctctgcagtagagagctgccacggcaggtgctgtacttttaactcatggatggagaaaccttccgtaagtcaatcatcactcctcactttattactttatcagaaacacatgggtgattctgccctactccactggccattactggcagtggcaccctgtttgtctcctgtccatttcaccatggctcttcctctgcctagtttcctgtgatgtcaacagacttaggctgtaaggaaatcttagtgcctttcatttctctcttccacatctgatggaaatctgttttgaatgccttcctgctatggtgtctgaaccgtggtgacatcactgatgggtcaccagactcacggcataaggttcaactaacttaaatatcttacttctccttctaaaataatactcaacaacgaaaatgcattcatggttcttgttctcttgactttctgatatttctagatttaagctcaaagtataattgccctggccttttttttttttttttgctatcagactattgatatgtaagttttttttttttaagatagattcttctcttgtacaatccatcaggcccagtttcccctccctctcctcccataccccttccaacttaccctcatcccctttccgacttaccctcaccccagatccacttcttctccatgtcctcctcacaaaagagccagactctgagagacaacgaccaaacatgacaacaacaacaacaataataatacagtaagacagggagaaagctggaaaaggcaacccaacaggaaaaaaaagagtttcaagacaaataagtcaaagacaccctcactcccatagttaatcacacacacaccaagggaacagccacgctatttatgcagatgacctggtgcagacccatgcaggctccatgctcgctgcttcagtctttgtgagtcaatgcgcagcctgcatggttgattcagtgggctgtgtcctcctggtgcccttcatcccctctggctcctacgatcttgaaatcccctcttctgtgggatttccagagcaatgaggtgagcaatctgatggagatctccgattttgcctttctacataatgtctcatcgtgggttcatatgctcactctgatgatggaggaagcctctctgatgacaactggacaaggtaccagtctctgagtatagcagaatatccttagaattcattacactgatgtttttttctttttttggctagttgtgtttggttctattctaggtctctgggctatccagtctcccattcctggccatccaagcagtatctggcacagactccttctagtggaataagcctcaagttaaatcagacattagttggccactcccaacgttcatgccactcctacatgttcatgccagcattgctccagcacatattgtaggcaggacagattgaaggttggtggtttaatggctaagttgatgtccaggctccatgtagcatcagatcaacctctccatgttcagtgagctgtgtggaagtctgtaggaagggaacctggctgtcagttagcagagggaaacgctctgtcctcccatcagcctggttgtttgaagatctctgcaagaccttctcagccaacatctcagataggtaattttcttaagcctggcataatgaaatttaatagattcagtagcttatgtttatcttttcagaatgccaagtgccaggaggctgggatcaggatttgagaagcgctgtacttcttctgtctcacttccctcctgggtttctatgcattatcttcttcccgagtcttgatgaggctttccattaaacaaaggtcccagcttccttttcctattaggacatcagtgacattagattagaacatgatttttttcttaatcatctctttacaggctctatctcctaaaacagtccattctggattactggggggaggtgaggatcaggaatctaacctatgatgttcaggagccacgactacattcatgttagtgtgcatcttgtctgttcactttcttaactgtgtgaggtgttgggaaattaagcatcccatccacctattttgtgtcagagcagagatatggcttgggccctctgatgcttcaggcaattattctacacatcgctgctctcatgtgaaatctgagttatgcctgggctgctggtatcttccctctactgcccaatgtgtttgctcagcaccactgaatcctctgtgcaccagtcccttcctgtcctggatgctgagcagtcattcacatagtatccctcacatatcctcttttcaacctctccaatattctggtccctggtacagcatcatgggaagaatttgccttctaattcctctccagaccccacccttttcttcatgtattcatagggtgcttccccggaatggacatttcacccttcaatgagaatgctgccttgctcagcagttgtgcctgcaaggttttctctcactaagcgagtattctagacactggccttgtccatttcgtccctgaaatgaaagcattgctttcataaagctctttcctcctgaaaaattcatagcgctctgagcacgtacatagagcatgcctgtaggtgagtaggtggcaagtatttttacccggttttattaaagcagtggcagaattctctgcaaaacagtgccccctggaagggtaagcagcttggactgagccagtctctgctctgcatgttttatccaccaccaccaactctctggggacaaacagaacagatcgaggacagaagaacatcttttgcagagannnnnnnnnnnnnnnnnnnntccctcactaataagggggagttctttataactcattgggcttagttctgttaatcatctgcgtggagtccatgaagttttcaactctgtggctacgtatcccaaaatgttttctgtagtggaatgaaagggcttgttttaactgtcaccttgttgggaggttaggagtcccttgaaaggcacacagaacactgcttagtttgccttatccatcagctcactgcttgactatattaaagaagtctcttctcttgagccaagactttgatgtaatagacaggagagcatgattcagtaagccactttatctccagcatctctgagagccgcaggtgtccacctgcatgaggaccattgagtttgcctttacctcctgcaaactttccccttggatggacacagcctagtgccaaccagctaggtattgacctcccaggaggatcaggagcagcattggatggctcaggcctccaagtgtctgctgcttctatcaaaggtgctttaaatagagctgcctgttaaaaataagtactgccaattctcaagctgccccgtgtttccctctttcttgctcccttggatgtttttcacgatgccacaaaagtctgaaaaacatggataatggagaggaagagagagcaagctcttttgtcataaggatgaagcatgagtcatctgttctgactcaccttgaacatacaaaggaagccaatcagcagggaacagtctaatgggatgtttttccagtgactcatgcaggcctgcaacaaggggccagaagcaaaccaaacaagtgtatttttaaatatgggcaggagcattttctaggacaatctgatggtgagtcctcacacttgcaggcttattttaagccagaccctgaaatgtgtgggcgtggtctccacagaaccttctcccgtggttgtgttttgtttttctatgtttaaagggagtgtttaatgattaaacagcacttaacaggactataatactccagggtaatatgtctgcatgaggaggtaagaactttctaatctagagagtccattgactttgctcctgtgcacagaaggctgcttcatgtataattctatactgaaacatgaaagtaaagtaataattcaagccccaagatgcttagagtttttacagagggtcacaggaaggaaaaaacaagcagaggggttataacttggaaaacgtgtgtaatggaaacacctaggaagatcaccctatggaaatgagtaaagagacccatagaggtggacatgaaaccaccagctcctggaagaactgtatttgctgctgctgctgttggaggaggaggaggaggaggaggaggaggaggaggaggaggaggnnnnnnnnnnnnnnnnnnnnnnnnnnnnnnnnnnnnnnnnnnnnnnnnnnnnnnnnnnnnnnnnnnnnnnnnnnnnnnnnnnnnnnnnnnnnnnnnnnnnnnnnnnnnnnnnnnnttcctaggctgttacgctttgctctctaaggccctcagagctgtctactaattatgatgggttcacaagggactccacattagtgaagtacactcgatatactgtatggaagttggtgtcttaatgggtgacttggtggaacccagcccacattaaaatgtcacaggcagattgttagaatgctaatgacaatgatgtaatctctttggagcttgtgtagtcttcgtgattgcagtctcaatggtgaggtggctaagaaaggcagctcaaatgttcgaattcagttgaggatgcagagtaagaccctattttttctttgttttattttatggagaaatttctataaaacaaaagttcataacagtaaaaggtgcttgctgccatccccagtatccacagtgtggaaggagggaactgacttctttgagttgtcctctgacctcaagtcgtactccataaaaatcccatacgcatgtacgcacacccacactcacacataaacacacataaacacacacacacaaacatacacacacacacacacacagatagagagacagacagacatggacagacacacacacacaaacagacagagataaaatagtgaaggttacaaaatccatttgtcagagaatagttttaaaaacatgttataaaaattgagcaactaagacaagaagtaaaaatgtctgcaggttacaggatggaaagtgcctttgagcataaacttttgctcatgtagaagaacattcccataagtgtcttccaactgagtttaagccatctgacttttagtcccatccttcgtcaagtttcttcattaaggtgtgttcttatctaaaacagaacctcttcctggtaaaggtttaagcacagagagaaatgacaccaagactctggaagccaacatagcccttactcctagagtcttctccaaaaatcccctataccctccccctccccctgctccccaacccacccactcccaactggaattcccctatactggggcatataatctttgcaagaccaagggcctctcctcccattgatggccgaataggccatcctctgctccatatgcagctaaagacacgagctctgggggtactggttagttcatattgttgttcctcctatagggttgcaccgctttctgtgcctccacgatttaaaaactgagtcggccaccaagcatggtggcacctgcctttaatcctagtacttagcaaagcttgaggccagccaggtctacacaatgaggatgaaaacagccagagctacttagtgagaccatgtctcaatggaaaaaacacaacagcaacaacaaaaagaattaaacctgtttcatgggtatcctatgagaattaaataataactgtaaagcaccaagaagagagactggtacatattagagtaagattggaaaatgtcaggctgggttgccatgcccaagtattcaatcccacctcatatgaagaggtgaatcttcaggaaaacactcaatcagagaatttgtatttagctttggtttttgagacagagtcacactgtttagctgaggctggcttggaactcactactacatagtccagactagtcacactgtgtttccaaggctggcttgaaattctacatagcctaggctagcatgaaactcaaggtaggacttctaccttatctactgcatccacttggcttcctttttatttatttagttattattaaaccacttcagaaaaacatcctaaggaattttaaccttcttctcgtggtagatggtatctttttggttagtgaaaagacatttttttaaaaaaaatttagaattatttattatatataagtacactgtactgtcttcagacacaccagaagagggagtcagatctcattacagatggttgtgagctaccatgtcgttgctgagatttgaactcaggacctctggaagagcagtcagtgctcttaaccactgagccatctctccaaccctagtgtaaagacttttatcccaaatgaacagtaagccctggatcctgttatactgttggtcagtgagctgaatgattatataacttttgttttacttctaaactgtccaaaaacaaaattagagaggaaagagtttgtcttaaaatcccagtttacagtccatcattaagggaagtcaagccagaaatttgaaggcaggtgggctttgtattcctaccacatttattacttcagaccagtgaacttattttatagctatgaagtacagcaggaactctagaggagggtagcttataatcactagctttcttacacagtttagtaccacctgcctaggggtggtgccacccacagtaggcctttagacaccagatacaatctcctatagacatgtccacaggcatgctctaggcaatttcccaattgataatttcttctcagacgactctagattatatcagctgacatctaaagctaaccaagacaatggactactgcttgttgccttagacaagaggactgatacaagaagcatcccagggaattggtctgaagatgaacaaatatctgcgtatgaaaataatcctggttacttgtgtttccaggcagcttccctacttggtcatatctaatgccccaagtatcatggaataaagattatgtccgtttcaaattgtttagccagttgtcactctgtccacatgttgagaaacttctgtttggtcccctcaaagctctcacatgatccttgaccacagagtgtgatccttgagtttttctatttaaggtactgaacagaactgtttgaggtaaaaatgatagggacttaactcattgcttctttcctgatagcaatctgtatcctcccaaatctcacattggcaagggcatgcttgtcagtagattactcccctacagtcacccatgcttcccttaattccacccccagggttaagtcctgttaacagtgctgagcgagccttgaggctgtaggacaggataagaagcagcgagcgataaactctgtgcctgtgcagagctgggggtggttgatgcagaaccccatgctggggctgacttgaagaagagggatgcttctttgtattttaaaaatataatcagatttttttctgttgaaattgtataataaggttgcttccattataatagtcttcatttttggagaagatttctatagtctttctaatattctttataatagtcttcattattctttttttttttttgaggatttctttactctgtttttaaattttactgtctttttaaatgaggcctctacactgtttataatagtctccattgtcctttctgtagagtccaattttcaggacagctacagaatatataccttcttcttcttcttcttcttcttcttcttcttcttcttcttcttcttcttcttcttcttctttctttcttttctttttttacaattttctttgttttgttttatgctgggtccctactgtgttcagaagacctaattaaaacaaacttagactgagactaaagtatgaagtaaagtatgtcagccagactccgacaactttaagctacactattgtaacaaaaataattcagtgctccaagggatggatatcaaatataccacgagttgtcaaagcactggccaatcgaactcatgacctgatttttttcattgtcttcttttaagagaacatctaagattggtttcaaaaagtcaaggttgagtagacatgcactgggtcattttgaaggatggactattttaagacatcagataaagatgtatgtgatggggcaccttcttgggcaagtctccttctgtctgatgccccacgacaggagtgctatgatgcagctgattgcacaaaagcttggggatatgcttcatgtcctgtaaatgaaaggatggagtaataaaaaccacagagaagggaaaagtgcagctggtggtgcaagatggatggggaccaagaaaaagagtgtgagcgaccgtgttcctgaaagattgagaaagtgaaagccatgaagagaccagccatgactaaatcacagtcctgtttctcgtgagctcgctactctgagggacagaagatacagtttacagaagcctgagtggtgaagtatctggagcagccaagagccaatctagagaaaactcactccatgggctttgcacaaagaataaccaaagagctcgacatgttgaggcacaatctggggggatctgtgtgataaatgctgactgcaattgactatcggagtttactcagtggtcagaaatagttccacatggcagtatcaggtagaacggagttggctgccttgctgaggccttcatacctcaattagcggcacctacaggagatcactgttagctgacttcagcagagacattgactgagcaatgacaagcaggcacatgtgttatgagcaagccttgaccagttagcccttaaaatcacatgtatttaatgcagaattactgatatatatatatatattttttttcattgcacagtacatacagtctatgggatacttactagctgcagtttagtaaaccttcagtccactgtaaccctcaagtgcctaacatgcacacacacacacacacagagttattttatgtattttgtgtgtatgaattcaccccacatgaatgcttggaagttaaagctagttgtgagtcactacagtggcgcaggtcctaagagcaacaagaactcttaaccactgagcgatcccgccaacctttctgacagcctcttagtatgccatttctcaggatgaattttcttaaatagtgtttaaaagggatggaatgaagctactttctgaatgtgctcccctgctggagctgctttggactgtaccactcaactagaacattcctcaatttctcactatccttcaggttcctgaagagaagcaagtccagaaagatacataatacatacatgtgtatctctatatctgcatatgcatatataacatatattatatatatacatatatatatattattttcttcataagaaatctcttatgtattcattaatatacattatttttagatttattatgaggaattagtgttactggagacgaagcagccccaacaagcaccgtgtgggaagaggaaagccaataaagctagtgatattatttggcctacattggagggacagagaagtggggagtaaatttaagatcttctcttgcacagggcaagttgagctgacatgtcccagatcaagcagttagggaggcaagaggaccagattcctcctgctgctaaattttgtgctgttggatttgagatggtgccaaccaacactggttagggcaatctgtggcatactcattcaaatggcaacatccaaaaccacttcaacagaccagtacaagtcaatcttgacctacaaaattaaacttcaccttgacccccaaagccaggtatcctgtatttatccagctaagtgggctccaccttaacgagcatcacaaagccacaccactgagtctgctatccagtaaatgctttccctctgcctgctttgcatccttggcccaggaatgtgcagtctcatctctggaagcagctctggaaataatgtgggctttttttctcccatcaaataaggtcccagaggtgtggattctgttctgtactttgcttgatctcagttagaggacacaggagaggtgcgggcgcatatcggcatgatcattttataattataagcaaactctcaggggtctccactcctgttatcagaaatcttcagtgactgggatttctttatatttgcttttggctaaatagttcacaagatgaccttgacgatgctactttgggacttatcagaagaactgggttaagtcatgggaagctaactcagtaagactcaccacaacttaaaccaaacatatgttgattaaaatataaataatatataatagtgtatgtgtgtgtctgtatgtgtgtgtgcattttatggctagcgtgcacagagcacttgatacatggcacctgcatgtttcttactggagacccagttattttcttttactttcccatccatgtgcaaataatatttttacataattattctggtactacagtcttataaatctttgcatttgatgatattgggttttctgaatttgccatttgagctatatattctaattgctaatacagttgtctttgtaatgtttatatctgataacctttgaataactttacattcatgtctaatacccacagatcaatgaaatagaaggtactatctctttattttaatgagaaaaattaagattcagtacaaccatagggcactcaagatcctgttgctactcaggggtgatagcagaattggtacacagaccaacctcctgtggtccctctggccttctgtatccacagtcttcatgactggggcacagcctcaggaaattttgggggaagtgtcttgctgtgctgtgtgtcttgattttcagcatgaacactgttttagtatttctttcctttttctccagactctggaaaaaggcctacaaggaaagtgaacagtgaagcattgggttaactactgttgctgtctctgtattgtagatttcatgctatttttaggtttggtagatggaaaaaggagcagctagagttctagtaaagctgatttgaggaactgtgaagttctgagaaagtttaaagtctccgattctgtctgaggtagtgggggtgggggtggggtgggggtgggagttgttctgtattgcctgaatttatgggaatgagggaagtgcaagtttattgccctggctctcctcacctctcctacctacaaaaggttctgaactttaagcgtcttcccacacagtgctgctctgcaccatcaacagcaaaggtttccaggtctaaaaatagaaaacccaaggtcttctgggaaacagcaagaagacttcatatacatatacatatacatatacatatacatatacatatacatatacatatacatatacatatacatatgcatcttagaattcataaatgtataatcggggcttactgtaaaaccacacatagtcttaatgtgagtttctgtgccacagatagctgctgacattttgtgactgctctggcaattgtcatgagttaaattcttttgagtatatatgacttatcacctcttccttgtaattcgtaattttacatcaaaatgtcgttatgtgctagccctatttattaatctttcaaaatgctcatttccaaagatgattgtttgtcaaatgattcacactgtcatggtataaacagtataattttcccagtgcttccaaagcccacagctccaagttcctgcaaatgggtttaaagactctctttgcataactcgggtcatgaagagatttttggcatcttaaaaagtacatgtgtccgagaaaattaccatgatagagcaaaaattgtctatacttgcctgtgtcttcttgttatctcatctttagtcaggtacttttcttttgtaaatgtctacattaggtggtatgaattggttgaaagggtataaaaacaagtagcaattttcttttctttctttttttttttttttttatttaagatttatttattgattatatgtaagtacactgtagctgtcttcagacactccagaagagggagtcagatctcattacagatggttgtgagccaccatgtggttgctgggatttgaactccagaccttcggaagagcagtcgggtgctcttacccactgagccatctcaccagcccgcaattttcttatgaagaataaatactagcacagaaaacattaagctaaaccagaaaatgccatgttgatgctttaataccctaagatgcacagatggaatatgtagccatctcgtctctagacagagagatagaaactatgaaatttggtgcagccacaatctcctagttctataactattgacaagcattagagagtaagaaataaaaataaatcacaatctcatgtgcacacatgtgttgtgtgtgtgtgagagagaggaggggggagagggaggggggaaagagagagaaagagagagttgggatttgggagttagcaatatattaccttatctcatgtataagtatattttcaatggggtctcagaagtgggttttaaggtcacaggacatttttaccaccagttcttccttcctgctcatagtatattcactacagtatacaggccattattttctgagaacgtcatgacaacatgggcttcatctcatattatccaatagaaaataagaatacatgtactttggcagatgttgctagtttgggtgacttttgtattctatgtgttgtactggaggctaagtccccagtgtaactgtactaagtagaactttgaagaaatggaggcaagtcagtcattgagagcattgctgtggttaggattatttattgctggtttcttagagtaagttagttctcttttatgaataggttgttagaaaaacaaatttgcttttttttgtcctaggatacaatctctccttctgacaaacattcccacaattgttttttcatcttcatgtagacaaaagtccttaggggcagcagatgttagcacaatgttcttggacctttaattatgagtcgtataagcatcctcttaataaaaaaagcctccagcctccagccttttcttacagcaatagcaaatgggataataattctgctaaatacgtgtgtcacattcttactttatttttagaacttacatgtgtatattatagttacttagaaatgaattagatgatggcaaattaacattctaacctaaccctgaaaatatctttatattccaaactaaaaagaccagtgagtcaattctcttgtacaaaatggaatctcactgagataaaaatagtgtgcttaagaacaatttggctttaaaaatgtcgtactatttttgtctcattgaatgtttctctaatttcatttataaaatcattgcctgctgcttcaatttctttcttcaataggccttgctgttttcttttaaagacaataataaactcaccctccttataatttttttaatctctgaattaaagcctgttcttgagacccagtccttccatgtgattattcacgaactctcctatgtgtgtggccttggacatctataccatgactgataggttttgtaatctccttgatccgaactacattgagcttcctcttgtgttttccactcctagaattctttttgtattgcatgggagaagagtgtggagtagatcacaaaaagacttttcctgtgtaaccagctgaaacagctaggaatgaattgaacctcagttgtttaacttaaagcatctgtgattacagagtcgtggatgaactgctttacctttctcatagttcttgccttcaagtgtgtaagactattctaatggattcagtgatagctaatctcattggccatgtgacactccatggaaaaagggaaccttagctggaaaattgtctccatcaagattggcctagagacatgtttgtgggaacattttactgtttgctgtttgatgtagaagatcccagcccactgtgggcagcaccatacttaagcaggtggaccttggttgtataagaaaggtatctgagcaagaataagccagagaacaagccagtaacctttgttctttggtctcaagctcctgccttgagcttctgatggtacattgaaacatgtaaaatgaaataaaccctttcctcccctaagatagttttggttatggtatttacctacagcaatacaaaacaacctaggacagactcttgactgtctgtattttgaatgttttagagaaaaaactctactactaaatattatgtttgtttgtttgtttgtttgtttgttttttattatggaaagatccttaaagagtgacatgtccatagaagtcctatagttgtttatgtatcatgtggtaaactaacttgccccagatttgttctctgcctactcttcagtgaaaggggcaagtcttaaagagtcatacgatgaagtatgcatgatggtgcacatttgtgtgcccaggaggctcagttaagaagaccacgaatggaagggcaccctgaggaacattgcaggaccccgcctcaaacaaagaagacgagaacaaaacaagagtgtaaaggcgggcctttcatggagagtctgagcacactgactgcagacatggaaggaacactggattctgttcctggcccctcactgcagggcacttaactccgttactccttaggtttctgtgtgcagatcataggagtattttcaggtgggaaaaatctgaactaagagttcacagcccagtgaaatttcgcctttgagatctcaatactcccacaggttttaacacaatcaataagaaatagtaaagaatatgcaccaaattcttcatgatatgcttcacagaaatcaatgctcttgaccttcacagttgacgtaataggctccaggatcttaactatctaaggatataaatcatttgaggaaacatcaaatttgacgttttcatgcaaatatgtttgaccagaacacttgtactcatgcatcctgcgcatgttttcttaaattactattcaagtacttcctgaaccttaactttccatatgaataattatgtctaagcatagtttcaaaaatgtaaaaacagggatctaagcacagaattccagaggaaaagtttggctatggtgtcttcacagtggcaccaagagctctttctaatcatctaggatacagccctcatttttaggctaataaacgagttgtagaagctcagtcgtagtcttacattccagacataaaagaattaaataggaaaggaagaacaaaggagaataagctagtagagcctccctcttctcttcctttcctggaaagttgactaagaaatggctccttttttgttattggtcaggacttgttcatgtgacttctcttagttaaaagagagcctagatattgcattttgcagctgctttcattgtcaacaagatcaaaattgggtttctgttgacatggacctgaagttttgaatttcttgaattacatcaatcatgtgaattcatccagagggaccttcactagtgaccaactacctgggggtaacttggtatttggtagccagtgagtggagctttatacaacaaaagcttggagcaaggttgtgaatttttttttttttttttttttttttttactcaggagagctgtcaaggtgcaatgtgtcccagacccagagaaaagagaggaaaggctcaaaaaacagtgtccctgataacctggaaccttcttaagccatgagtagcagggcacaagcagagggatggataatagccttgaaatgtgacttacatattcaatgtagactaccttgcataactttataaatatgtgatgacgaaagaagttgtcactttagaattgtgtttgggaggttcagcagaggcagttaaccaatgaatacatatacggaggaaaagcactacatacagagcatcaatgatgagctttggagttatttcttcctaggttttcatcctggaactacaatgtgtgatccatgtagagtggtctaaatgagaatggcccacataaactcatatatgtgactgcttagtcctcagttgatagaattattctggaagaattaggaggtgtggcctttttgtaggaggtgtgttactggatttgagatttcacaagcctgctatccgtaattccttttgcagatcagggtgtaaactctcaatgacttctccaacaccctgcctgcctgcctgcccgcctgcctgcctgcctgctcccatgctccccaccagtggtcatagacttactcactgaaactataagcccccattcaactctttcatctataagttatcttgattatggtgtgttttcatagcaatagaaacgtaatgaagatgccatgcaccttgaaaagttgtctcgtttttctgaatctcgtttcttatctttcaaacaagaaaaaaatggaaaagaaaaaaaaaaccaaaaacctaatacacctctcatgtgcttgtacattactgataataacagacaaaacctctgtccagtgcatggcccacagtggtggaattgctagttttagttctatgatgacagggcatgtgttctcaactggcaggcactaactgtgcacttgctgggggagccccactgcattgcaggctatgctctgtgttcttgttgaaggaggtgtacaggagatccagggaagtacaaggagaaattaactttctaggcagcagccaccaggaagttccctgtgctcttgatgtcagcgaaggctgtaaacctcctgctaggtccactaaattgtaggtttccaatgcttacttgggaccacctacaaaaagctcgtgatgaaaggcttcgtttctacaacttttgccttcctcatatataaaatgaatatactcataatgtccacctccctggcatgttttcaagatagtgcctgtggaacctggcccgtaatgtgcatccagcaaacactgtcaattataagctacttccctctttccatccaaccaaaaacagggctcatgggttttggagctgtctcagctccagtaatgctataaaaatttaactagggcataaagtacacatataatcacactaggtccaaaaatgattctgtgataatgtgattaataacgagttcttcgatcgtaatagcatcttaagttgcttctgtagacttgtaaatttcataggctccagtgcttatgaaagtgagactggcggctcattgccagggcagcaagctgcacattaggcctgtattggtgttgcacactccctaaatagctttgtgtctcaggtcaaaacttcacatttgctgcaatctctctggggggactgactttacttgtgtgctcttgcttttccttgctgagatgtgaacaagcttgacaaggaaatcgaggagagtccttggaacagtgtgctggtatctgagatttgtcatgaccagcacctccctccatgctcctggtaacttttatcatttccagggcaggttttctatgaattgtgccaggtgctcctctcgaacgcctggaaagaaaggagaatgattttcattactgttttttaggtaagaaaatacaagctaagcaattgaaagtaacatctccctccttggcatgggctagacatgactccagatctttgcttctcgttcctttttgcatgactgcattgcaggttacctctgtccttatgccgtctggagacactgggcatttctatatcttcatatcaaattgtatttgagaaggagtgagctgtataaacacacacccagattctttagatgggcagacgactagaagctctatgctcataaagcctgtggatggatgggcttagcacatagcaactgtgctggagcagaacctgttcattctaggaatgccggggttcataaccagcatggtgttgtaccagaaatgatttggctattcatactcatggcaagaagcagacgttctctggtttaaactccatccctaaccctcccgccctctcccctcctgaattcccaaagcctaaaatcctaccacctcagatcttgaacactagccaaacttcgaagagatttcaataaaatagaagcgttttccttcagagcgtataacagcactcattataattagtgtgcatacatgcgtgtgtgcatgtttaaaccttgaattaggggtggggggacaggtcacaaagctgagttcccagaactctatcacatcctcctctatgacacaagaaataagagatgctccagtgatcaagcaagttgtaatatttatcaaaggactgacagtattggggggctggagagattgctcgatggtcaggagcgcttattgatcttgatgaggacccaggttctgtttccagcatccaaattccagttcatgactgtctgtaaggccagttccacatctggctccctcttctggcctttataggcaccaggcgctccttccttccttcnnnnnnnnnnnnnnnnnnnnnnnnncctcactccccccctctctctttctttttttatgaatctttttctatttggagaactggctgaaccaaagagcccttccttccaccacttgtcactggttgggcttatatggtttttgtttttctctactggttttatttatattaaaaccctgattggtatgcatgtgtcttgctgtagtggtcgtagagtttgttttgcaatgatagaaggaacaaatactttcccacttaggggccccgagttcatgtcatttcttacacgatatagtagaatctagaaaattcctgtttggggagtcaggtttaactcagtggtagagctaagctaatcatgttcaaggtagtaggttcagtctacagcatcaacagatttctttgcagaatctgtcccagaaaacagctccttgtcctccagtcactctcatcatctctcttcctcaccacctcctctgaagccatagggtacttacatacatgcaagatgaaacactcagacacatgaagaaatgaatctttttcttttttaaaggactataaaagtacaagcctaggacattgctggatgtgaggaggggcttagggcaaagggggtggggaagcaggtctgaggaaagggagggaggtgtctaacctgtctctttctcaaacacgataaccataactaggcttggaagcagtctgaactaattttctggttgcttgtgagagctggacattgcagcactcagagcattcaggttgctttgacctccagccatctgtgcccggcctgtaaagttaaatggccagtggcatcagatggtgagtgctcacaaacgatccctgttcactgcccctgtaagagagaaaaaaatgccccctggagaaataatcatagatgctattttcaaaggtggaattaattgtatactcaggaaagcccatcttctgccaattattctattagggtgacagaggtattgtgcctctgaaaacagcaggaatagtttctcaaaggtcacctacctcagcactcctggaacaaagcccttggggtcacattctctggtggattagcaagtgacattttacagtcaaaatatgtacctaagaataggcctgatcctctgaccttaagcttttaagggtgggagctgtcttttggtgactttttaaaattacttttcccccgtggtcacataatcttaaatatgtccctttgtctctatggacaccaaacgtgagcttgatcacacattccactatattaatatgtccgcctctgttcgatctcgtccctccagctagtgagacctgcaacgactttcacccgatgttcttcacccatgacagatcttttgaggaattcttctgcatttgcattcaactcctgaacaaaacatggaaggaaatgagggcaacatctgaagacttcaacaaggtaacgggtgtggtcacccgccatctgacaggtctggggctcacgcctcagatgtggtatactatgttccctcagctgtgcatagaagcagtgttcgagggaagagaaggaaaggagtgtgattttaaatcgcacccaaaatggaagcaaccactaggtatctgcttggggtcgctttggcccctttgtctcagccaaggccaccaactgagaacctttctggagaaactctcctggtgattttttcctttgtggttttggtatgggatgctttgtcactggtttgaggctattaagtaaggcgtcatccctctatctgtgtagaagacaaatggagagccagccaatacagaagacaactggctggtccattggtatgtttgtgtagtatggacaccttaagttcatatgactgcttctatgtccaaataacaattatttctatgatggaggttctctctctctctctctctctctctctctctctcatctctatctctttctctatctctatctctatctctatctctatctctatctctatctctatctctatctatctctatagggttatatggaccatttcagaggacagcttgcctgagtagtcagttctttgctttaattgtgttggttccaggtcttgaactcaggttgctaggcttagtggcagatgcttttaccctctcggccacctcaccagcatttgtttgttcttccattgtcattacttgtgggaatatgactttcctgctgcgatagatgtgagaatttccgggtcaacttagaggagtttgaaacagagtccctacttttagagattaagaacatatttctctttgcaacagacatgtataacagtaatggctaattatgtctagttttagggtctggacaggtatagtttagcctgtaaccgttgtaacatgactctaaacaaggctccagccctttgctcaaacccactctcctggttctaaggatcataactatctaagaatttggtgtgctacttctgtggccttgggacatagataacatctaaacttctaacttcatttttctccctgttaccttctgtctgaatgtttgtcacctctattttgttttgtttccaaattctgttttgtgttatctttaaccactcatggttgaaaagaaaggaaagcaggaaatgggctgaagcctgagccaggcactgccctggcatagttacctcatccacaggtcatttccctctgtggtgccttccatctttcctttaccatccaatgtgtccccgttgaaccccgatcagcaaggtgcatttgtctgaacatcattgtctgagtaggcatgattcaaagaagcctgagagcgaagaagccattaattcacttgcaatcacagccacagcctcctctgtgtacttcacttgattatgagagactttgctattcaggtgcaaatcaccccagagaaaggaggccttccccactcaagtcacaagaggagacttaaatcaatagcctttcaaagtggctgtggccactctgccctggatcagcgtgactcttcatgtgctgtgggggcaggccagccaagcaagtctctgtgttctgtgttaggacactcactcctcgtggaaggctacctcaccatccgtgatatagattaacattggttcaagaattagtgtcagagaggggtcaagcatagaaaagacacgggattttaatttcccataatactctgcttttcccctgcttattaaagaaaagcatatttcaagatgaatgcataaacacatacatgaatttattgaaatataagtacacagatacatagatatagataaatagtaaatagcatatgtattcattttcttttcctactaccacaaatgactgcagaattagtagcttgaacaatgcaaattttttatctgactgttctataattcagaagctaacagtgtctccttggatcacagttaaggcttcaacaagcaaggtttctatctgaatgttctaggggaaaatttgtttcctcacagtctttagcttctagaggttgctatattccttggtttgcatcctgtttctctctcttcaatgccaaccgctgtgggtctagtcctttctgatgccacctctgatgtcttttttttaagtgtcccaagattgtttggaatttggataattcacgataataagctcccagtgttaaggttggcaaaaaaaaaaacaaccttaattctattggtaacctaaataacgctttgccatgtagcacacttacacatcttagggattaaaacatgggcctccttggagggtattctgctgaccatcatagtctatattttatctgtgtttgttttatctataagtgttaataacaacttttaatacagtattgatagaaaaactctttgcttgtaatttgactggtagacataattccagaattcagctgagagcttctcaggctcaatacagatatgtttgtgtcccctttcctttgtgtccctgttctccctgcctttttactttgggggcaaaaagaaagacgacaatgagtgtgcagtgtgagagccactaccaccattccatgcagcctttccattttttatttcttttttcttgcttcctgcctatcaaccactgtgccgctttactcaataataaatggaagcagagagaagtgctgaaattgaaatcagttcacttttcttcttgttattaacttggtagcagaggagattgaatttaggaacaaatgtgggtttggagtttctggtagatttaaatgatatcatgttcctgagattgtctaaattcgaattcaggaatattttaaaagaacccaacatgaaacaccattgcttttgaaatactttcgatatctcaggctctggtcgttttatatacagcatgaaatggagattgaattgcctacctcagggccactaattcaaaattttaatttcaccaacatagcacttgcagcacgttctagcaaaggcaggaatagcttctggtgggtaccctgacttcggcttcagcttgaaggtatctggaatgtgctagttaatgtcactagttaatgccactgctggaagacggcgtttggaaaagcagctggctactgctcttccagtcttgaggagcagcagacgggaagttttcttatttatgtaagagaagtagaattgggatgattaaaatacttatgcttcggaaagaactttcactttctagatatagcagtctacagaataatcccttgattcaggccattgagtttgtattctgtgttttggcttttattaccaatattttagaacatgcattattcatttgtaggggtgtcagggaagagctaaactgctgccagctattttcccacacaagtggcccaaccatcatttgagggcttcacttataatgttttgtttacaggaatcttattttatgcttgtgtgggttgtagttgtctcactttaattattctaacaagagtttgcaagtggaatatggatctatgcagcagtatgtctcaaaccgtggatacatttggagcacataggacctcttagctcagtgggcagtagaaccaccgaccagggaaaccattcagtgggaaaaagctatccacgaattgttttcatgaagttagagttgctcactcaaggtgagttgtaacaatgggatttccacctattgatatagatatatgccacacatatttccaactaattcagactgcctgcattgagaagagtactgtgaccatttgtcatactcaaaaattccatgcctgaaaattaacaaaaaagaaaaatggaaatgctgtctcatcttctcttattggtgatgctatagtaattggagtcatacatgtaaacatatgttgaggaagtaaatttatatgcagatgtgatacagctttttaaaaaagaaatcataagataaatctcatctgcaaacatggccaagcagctttttgaagttcattttaagcatatccggttaaaatggtggtgaatggtgaagatgtccgtgaaccttacgccaagttctgaacggtacgactaacctaacagtggcaaaaattaaacttatgctgacttcagcaatttgttgtcaaacagctttaagaactgacttggtttcccacattggcacatcatgatagcagcctaatagaatatcagcaggcctcaagaattgtgtgtccctaacagttgatgagaactagggcctctccaaaagctgactacttggtcagactcatttagtggtactcaagtcattctaaggaccatcagcaatctgtctttttggtattgatggcactatcaaaaatcaacattataaacggagatgacacaactttgcatgtttccatgtaatgaaatggaagtgacaattttaaaagtggccttactgtgaagtaagtaatagagctattttggaattttatccaacagcaaaaataggctaggcacactttgctaaggcttggaatcttacactcacagatgaaaagtcgtggatgcttaaaatatcagagaccgaggtgggacaacccggggctagcaaagcagctgccccttggccaagctgtgggcatcatctgtgtcaatgggagaaaatcccaattaggaagaattggagaatggaccagaaggaaacattctaagaaatcccctgaagaggagtcacagaaaataatggatcttggtgtggcataaaatgggatggtggttaaaatgttaacactggcaaatgcctgggctcaaaggggacggcttacttctcacattgcttttggcttactgacttccagtgtgtgctttgcagaagacagttgtatattcagaagtcctcctcccagccctgctcagctcactctttaggttcactgagccagcctatggaatgaaaggtagtctgtaactctcctcatgaataaacatgaggctcctcatttgcatgaggcaggtgactgtaaaataggcttgcagcaagtaatgaaaggaagctttgtgtgtggtgcccagggggagctgagaggactcagagttgtttatcttcattagaattccatctagtgctgctgttattgatctgaactggacctggtgtggctaataaagtaggtgtacattttaattgaaacatgaatatttaagtagaggagctgtcttttaaagaaaccctgtgtcgtgcaatgagattatatattattttatctgtccaggctattaacaagtatttattcaaaagccttctcatctgccacaataggtttgtaggtttgcagtatagacagacatcctctagaaccaaatgcattgtaatgaaaagatgtagtttttcctttaatgtttcccaatgactagtagcgagtggattcttgtgcttgtggttgtcagctgctaattcgaggtagcgttgggctttgttcatggtccttgccactttttattagattgtcctcgttcatcataattacactctcttaggacagcaggaagaccaagagtgactttgctaactttagtttgatgcacagcatttgttgaaatagactgtaaggtacttgcttcataaaaaaagaaagtgttggtagctgctgacatgaggctgcctgagtcaggcaggcgacagcagtgtggagctgtgttttgcaacctcttctggtcaggcccttgtaagcctttttacattatttcccttccctcatcagcttttctcctgaaattgttgttgtgatcataaaaatgagaaagacctatgagaatatgttctggctgggtgtgtgggaagggggtgcctcagtgggcccatgccaaggcatcccttacccctgagagaccagccacatgacagtgtagtataaaatagagtttatttagctcaaagggagggtaggtaagagagtagtagaggcagagaaaggcagagagaaggagagagtagagaagtagaggccggtaacggccacgtgaagagagagggagaagggaatggggaggagggagcaaggaggcaagagagagaaaggcaggagtaagagagagaagggggcaagcagccccttttataggtggccagacctacctggctgttgtagctaactgtggggaggagcattcctggctgttgtcaggtaactgtgcgggcagagtccagacagaataccaaaacttgttgttacagaaataccaagtcttgtgtattggtacccaaggtagattttcaaatatcaataatatatatattttttccttccttgtatagagaacaactggaatttggcttggtcacaaagggaatgtgtccacagtggaaatacattcctgagtgcaggagctttcctttaaggttcctgatattggaagtttccttttccagctcatctctcaatgtactacacatggctcagtgccagacacagtggagactaaaaagcctagctcatccttccttgtacccagatagccatgtggaaagggactcagcagcttgagcctcaggggtctcatctgtggaataagagcaagcactttgcctaccactcaggatggctctgtactctcctggtgtcagtagatgaactgtgtatcgtgtttctggatggagccggtatcaggcaatggtaatatggtcgtaggagaccatatgctggaggattttagctacaagcatttccaggaaaagtagacaagcttgcatagggacatttctaaaaaagaacacctgttggccatggttccaccatcacagggagcgtgcctcattcaggaagaagctaagatgacctttcccagatgttctgcacttcctgcacacaactgcttccgcacttacaaatgagagtgcagggagagagatccagggttctccaaaaaatcaatttgttgcttctgttcatgtaatcacagtaaaaaaaaatggttaagttgtttaacatttgtttgaaaggctaggataaccctagtctgctgaagtcatacctattgtgttttgccttctggacattgtctaccactggacatgtgtagtataaaacttcatgagtttcacaaacagtcccagataagcctgacaatgctaatagattcagacagtatccctttgtaattcaagactagtatagagttctcacttctgaagttttgaccaagcccatataactttctttgctgtgtccagatttggcaaatgtgagaaggaaacaattagcaggttcttccgctccacagcagcacaatccatcagtcccttggttcagttacagaccatcccttaggagactcgtcactactcaccaagctgattgctctattcatccacatctgaagcctctttcccttctattaactgtgttttggggactgtgtgtgaatggttaacaagtttctgtgacctgaattccagactccagtgtggagtataagagagatttcataatggcagagacaccattttattagtatatgttcaattaacaggaaatcacccgcattttaagtgaggcctaatgagatgaaagcattttaaatgaaagggcagacaggagtcagagttgcttagctaggaaggggtaccattctgtgctgttctcttataaagtgtaagtacttgttggtcaaaaaaagtatttatcttgtaattgcaaagtaaattatgttcagtgggagattaaaaaatgcagttgtagagagtgcagcagaggccatggctatatcatgtggtcactccctattgtcacctgaaagggccgggtgtgatgggcagaggactgaggtcaaagaggggacataaattgagataacgagtctatatttagttactattttgctgctctgataaaatgccataatcaaacaattttccttagtgctccagagggctagatgtctgtaacagagggtggggaaggcatgccagcaggaacaaggaactgagagcttccatctttatccatacacaggacacagagggaataataaaaaaaaagtgttcgtcagggttcttaaaggtgaagtggaacagtatgtgcgtgcgtgcgtgcgtgcgtgcgtgcgtgcgtgtgtgtgtgtatgtatgtgtgtatgtatgtatgtatgtttgcctgagatttattagactgattcacatacagggtgtggtccatctcgtccaacaatagctgtctcctaacggaaaagctatggatctggctgctgatccatctgttatactagatgtctcagcaataccagacccagggtagagtcccagggaggttctagagagctgctgttcttcagtctacattggactcctgaaggagtatgtcctcacagcagtgaagaagtgattcaggaacagggtagatgaacccaatatcgaaatcgaggtcaaacaggcagaaaggaaaaacttctgtcttccatgtccttttatgtgggttgctgtcagaaagtgtggaccagccttaggttggctcttctcaccttaaatgatataatcaagaaaaatacctctcaggtgtgctacctctttaggttttagttgagtccatatgtagtccagttggaaaccaaattaatcatctcaaatcggaactgagatgacactataagcccttaaaaaacgcaccccccccccagtgatagtcttccaccagaaagtctgtacttccaaaggtcccataccctctccaaacagcactaccaagtgaggatcccaagtgttccaatacaggagcctatgggaaccaattgtcatttaagtcaccacagagaatcaaaggtaatgataatttgtaaaggatccaaaacaagagctgtgagaagttagaaaactctaagtgaggtctgtgggtgccatcagcattgatgccagatccggggctggagtggtggctcggtagggaagtgcactggctccaactctaggttggagtcccagaacccatgtgttggctcacaaccctctattactctagttcagtcctgggggagccaatgctctcttctggctttcatggacaccacatgtacacaggatgtaccaagtgtacatttaagcaaaatgtctatacttataaaaataaacaatttttggccagactccctcagcccacacaccagcctaccccctctgaccagtcatagaccaaaacctctgagtccaaagaccaaaaacaggaacagagagtgagaggcaggaataggccaaaggggagggctaaatttatccataatttctttagcccctttgtggcaagtgttaaagggagaaaaatgaatagtgaagtttgactttgagagctctgggctcctaattgtttgttagtttgtttattctctctctgccttctcgctctcttgttgcctgtaactgctttgctggctctaaagttaggaggaagtggtcctatatgagtctaggtggaagaaaacgattaaggaggcagtcagtccacttatttcccaggttgagccaacatcttcttcagggaggttcctaagcctgtgacttgcttactaacaactaactcagatgtccctggggtacctaccaccctgctctgtcgctgtggatacctattctctacaacatatggcagtgaactattaatcctccagttatctcagagtagaaccttgaattgtctatattcataagagtcttgcactgtgcctgggtttggaaagacatttaaaatgatctcacaaccgctgtacaaatagcacggccatatctatgtctacgtcttggccaataaggtgattgactaagcaacattttcagtgtaagtcattctttctaaaatctttgggtctacatcaggttgtgcagcagaatatgaaaataacagaacactttcagctctcttaggacacacaagctagtaatgttctctttgaagactatagactggcttctgtttgaaaccaatcgctagccggagtcatgtaagcactggatagtcctttatcctttcatcattgcattgattcgtaggtttctcttctcatcccagatgtggtcagcttgatgcctcgtcacactgtgcttgcttggagacagttgtacctacaagtctttgccatattccccttggcttggtcagaaggctttcttgcaccaatgtgatgtaaatagatgtgatatgagaagagtacataagagctgtgcactatgggcagctgttgctaactcagggcaaaccccagactaacacatctgggtgcagttttctagagtcaacccgacattttgaaatgtcaagatataaccaaatagccatctcagctcacctatagacctgggagtataaaaatcttttgtgattgcttgttacacagcatctatataggaataactaagataccaactgttacattacttaatttctgtctttgaaatcttgttttcaaaatcaaatctgaccatatcattcctgcttctagacttcctgaggctggctgttacctggctctgaaagtttcacggtaacatacttttcctgcctctacctcgctttcactccccacctttcctaggctgccagcacatcctgaatgcccactgtttttttgtacgtgctgtaacacttttcatctctcagccttagctcatcctcattctctctgccagaaacgtcttctcccatctgcctgtcgagagcctacttatcctttaggattttgcacaagtgccacctcagtatgagaggtaccatctatctcccgttcaattcagtacaaagctttgcacctctgcctccacaatgtggaattcaaatattctattggaaaataccttctagctctatagtggcttttaattataaatctaacttcccacattaagtctatgttttactggatgcagaaatttcatatctcagtattctctcgatgctttgtaagtattggctcaattaatttggatcaaaccctaaatgaatggccagaaatatctgattcatcacttaaaatggtccttctggccaaaagttgaattgatttatatcatttcaatacagagtggatactgtagctcagctcccagaggccataggtactaagtattttgcagttatgctgtctaaagaattgtcttatctagacatagtagcacatgccataatcccagcattgtggatgtgcatagatatgaaatgagcagagaacttgggaactgtgtactatagatagctgctaactcattgcaatccccagactaaggcaggaggatccagagtccaaagccagcagtagcccaccattcctgagatgtcaataagctttactggtaaatcctgctaaatcgacccttcagaatgtcttctgcagatatcagtgctttgagagacttataaaataacattgccatttgttaattaaagtcacagtaataaccactctcctcccagcatagtttatataaagtgatgagacccttcagagaatctgacccactgcaaatcaaactcggtttctcttttccgagtagcacagttggaaccgtgctcgtttcccagccccacccattcattatatcactgttagtcacgcttaacccacacaccccggcagttcagggaaccctctagtctcccatttgtcatgttttcagaccactgagggaaagtaatgtcaataatagcatttatcctttcccaagatggctgtcaagagatcttctagggcagaggacaaatgcaccgtccaactgtccatcccttcgaggttacaggtgctacccaagcagacctgagaacgtgagtgtgagggttgggcttcttagatgaaaaacaggaacgtgttaaactcatcttagacacacacacacacagagacacaaatagacacacacagacacacacacacacaccactatgcattatttttgcctccaaagttatcttaaattaggggggatgttgcattattccataagtggcataatataggaagaccccctcaggataaatttatatctaggcagaattggaggtaataggctccttggatgggctctggtccccatattctttttttctagttcacatacacattggtgtggcatggttagatttgaagtaggtggcatatggctttttgctgcttgaactgccacagaaggcaatgtcattggcatagaatgccagatttccattttgtgaatcacagagcatggaattctgtctgaaggcttcctggctgcaatgtgtccttaaagcagaaggacacaaaaggtatgcatctcccaggtgtgctgctcctatgtgtgtaatttatcatgatggaaagtctgccggcaatggacatggacgtgccaatgacccgaggtgtggcagaaaggctgtgaggcttgtttaattgtggtcactgggtaaacaggctgtttgccccctagccgtagtagataccagtgagttatggttgttttctaagtttttcagatgaatagatgtctacttgtgcatgtaccagaaaaaaaaaaatacaaaagactgtgagtaaaagatacttgtgcttagaggatggagttcgccacaatgttgcagtcactagaatttcagattataagtcactttccaactgatgcaagagacctagtgctgtcactcctactcttagccttcgtctcctctcccacctagcctcttactgaggatccaagagaaatttgaagatttcccaaacagaggattagaaagaaccctatgaaattgtctatacttgacagtttaaaaggtatttcttttatttttgagattgtgattacaacatctttcccctttcccgtcctccatccaaactcccatatatctctccttgctctctttcaaattcatggccccctttttcattagctgttgttttaaatacacacacacctaaatacattaaaaaagagacagaaaacaccagcttacccaggctgtgtaatattacatatacgtatgtttccaaaatacaggaatgtggggctggagagatggctcagtgtttaaaagcactgactgctcttcttaaggttctgagttcaaatcccagcaaccacatggtggctcacaaccatctgtaatgaaatatgaagccttttctggggtgtctgaagacaggtacagtgtacttacatataatgaatgaatgaacgaatgaatgaataaatctatctttaaaaacaaaacaaacaaaccaaaaaaaaaaatcaaaaaacaaaatacaggaatgtgaagtggttcagctttgtaattgtgtgtcacataagagcaaaggtggctacgctccagaactgaccattgactcccatcctgagtttcccacagtaccctttcccccttcatgtaccctgttctgtgaccacttaactgatgagagagattgccatagagtctagccagactgtctctgagcccatggaatggggttcggttctagctccagcatttcctgtttgggtgattaactgtcttgttatttgtctccttatctctgaattataaaacttaatagaatagttatgagtattaaacgagtcgacttagatggaactgaaatgcagaattagccattctctgtggctcatccagtatgtcaagcgctgccttctggaaaagtaagggtctcagaggaggcacagggaagcctgagatctagcccagatctcttcacatttgtccatcatctgctctcaccacccatcttctcccaggcagagcttgtgttcctagactctgcatggccagctcttctgtgttttgaattctacccctcttggacagctctgggatgctactctgccagttatcagttttaatcattacatcgtcaatatcttcctctcagggccatatgaatgcactgaagcccccttacacgtgcatcactctaagtcaggtatcctcaaagggctatacctccatctgccttctttccttttcatttactaatttactgaaaacgccatcctacactaggtaaaaatgtattccagcaaagagggaaagtctggttataaaatacattgttggctcttcagaatctctttaatcacaaaatataccagttttgtcaaatgcagagagacttctgagggacagttctaaatttcaagcattttatttgcttctgtgcagcacttttacccctttggacactggtctttcttcatgaagagtgtctcgtggtagcttacaatgcacacatgcaaaaaagatccacactacatatacacacaccaagaccaacctacattgagaaaagttacatgcaggacatgaaatcatttttgtcgcctcagttcctagcacaatttttagaaaaatgaaagataagcaacactacaactacatttaaaaaatgggagcaggactttcaatatcagttgtgtgtatttaacactgagaaaactctttcatcagaaaagatgctacgctgttgcttagtttttcataagtgcacattataaacagatgtctactcaccaaaggttgggcacccacaacaaaacaaagaaattattctatgcacatcaagcttgataaagtaataagtttaattgggccttattaagaaaatgggtgagaagtgcctacagaaacatgaacagtttacatgtaaaccaccaaagaaagggctattactcccagaaactacatagatatccacaaaaggaggcagggctttcaggctcctcccccaagtccattatagaaagttaatatgtccaatggcctgtgatgtaatccaactaatgaataatcctgagagctctggagggccatcctgcacagaggacagtgttcctcaacacatgccatttctcagacaaaaatgggatggaaactggccagttactctaaatgtaaggttggaataaagttctaatgaaaagggtgtacatgacaaatcataaaacttacatcattgtgcttatttgcatctctcctactctgatcccttctcttcatccaaaatatggagacaagtcacctcaatccttacacactattttctagtgctttcctctgctgaggtcatattcagtccccgcctgtcactgtggtgacaactcctccaggagaaaatgctgactctgctgcctctccctcttgctgtggtccgtgtcgcttgtccccctgctgcttgtctagagtagcaatcagctcctgattgtcaagtctggagatctctccccagagctagtcccatcccattgctctaaagcgtgaccatcctgcctctgtgatcctgggatctttgccttgttacactcaggcaattgttcctctgacctctttagcataaacattccctaagcccaccctttttttttattgtatttgtgtatggtgtcctcctggccactcaaaatcccttgactttaacagaaggtgaattggagtctcctgaagttcatgtgtatgaccagtccacagacccttcaaattggatgggtctaaaatgagtcttgctgttttactctcctctcagctggcttttagtgctttctaactctaggagctctttggtgatctacccacattttttacttcaaacagtgggttgatctgactttctaacttggttttagtaggtcctttaattctgccatcctgcacgtgttggacaaagggacatctgccacctggtgctgggactctgtagcagcttccatgtcttctgcagactgtatgtgccttttattgttcactgaatctggacttggaccatccataaactgtctagtccctgggttccagaaggatcttttaaaaacacaggtttatggcatgatctttccatagtcaaaactcttggggtgggggggaatggctagagcgatagttcagaggttaagagcacttggttttcttatataagatctaggtgtctgctgtgggggattgtcaggagtgcatcccagaatccctttcacctgctcaggctggagtgcagcagtgagagggggaagtcatcaaaatgcttttagaggtcctcatctcctaagagtccgtgatgctcgggagaagaacagagtacccccaaacctctgtactgtgcctggagcatcctctgccaggcacttagaggtgatcctggggtttagataatgaatttagttctaaagggttcctggggtggaactgggtgggtgtaacttcacagtaaaatgcatggacaaagcaatagcatagacagtgtacagaaatcactcaaagttacaaaaagagctacttttaggagagcttttggcctatgactcagaacacagtagggaaaagcaaaatcggcaaggagttggagaaggatgaaatataatggaatacaagaggaaaaaggctcccaggggaacttgattaacatccagaccccaactgggaagccttgaaagaagcatggcacatgattggcgctttctaagtattctgtttagtaaagacaccttacttcaaactgaaatttttgtcgaaatgtaatttttttagtgtatttttccaaagagccaagatgtctagtataagatagattccacaacagcacaagcaagaacttatctgtgattcaacactggagattccttgagctctttgctccgtaattctcctgcctgtcagtgtgctggtagaactgtagttatttggaaactatgctgctatttggaaaccatgctgcatattctccctgccatgacttgataaaagtagggggtacttttgcattgcatattagaggattacttatcacccatggggccaattttttttatcatcaacttaataactactttctgaagttagaaacttaaatatgcaagtaagtagcaaagtaattaataaaatcagattatgtcgtatctgaatttaattcctgtacagttgaggttgtagagcctgttccccgtgagagtcagaagtaacgagtccagaacatttgtccaggagttgagacacacagatgtctgtagctgaaagtggaatgagggacagtttgaagccatatggcccttttcaagcagagaaagattgggcttagagaacaagcagctcaccccagtgagggcaacagggcttcactatgtgcaagcacactgttgacattgtggttctgagtgtacagttgccactactcaatgcattttcacacagagttgtgatattcccagcatctgatgacaaccacttttattacagagggtgaacataaaaataactcattcttataagtcactttagaatttgtaggtggccactttgctgtgtggaaagccccatccactgtgttcctgtgcctgctggagctgtacaaacccatctgcccatctttctctatcctcttctacatctgccgcatgacctccctgattgtgactgcctaactctctctctctctctctcctgcgtgctgcactagtcgtctttacctgctggctggacaggaagtcacttacctgctccagcttcttgttcctcttgttcccagcactgttcaccttttcctcatgccttgcttgctatgctctgatgcagcgacaggagaccaggatgcaaaggcatctggccagttgatgtgctgatgtatctgtcaatctgaagcagaaaagcagaggaagcgatagtctctggtgcttaagcatttcataagagagtcagccaagatttaatctctaacattttggatgagagtagtcttcagaatgagaatatcataaactagtgttttcttcctcaaaaggtgcaattgcttccttggggaatggatatgtttcagcgtaaggagaggtggactccaacaaaggcctggaaactggtgtgtagtgagatccaaagcccccttttcacaatggcacaaaagctgtttgcattttgtactattgatagagtatcttcctgttgacccagtaggcttctgacaccatattgccagggacacacttggcaacattgaactgagaatgtgggcatgttcattgcctccttttggcatgattctctccagcattcaattctgggacacattttcctagcatatttggaaaacttaaattggcaagatgctgagatctgagttttcccagctcttctttctaagacactcaggattgttagaaatcttcccttcctctttcccattggcctcaagtaagtcctttcaattttgtcaagtctgccacactccaaacatcccctaactggatcctaaccctcctgccattttggaaaagaaatgaaggactgtgcaggttgtaaaatgggcttgtattttgtggatgtgtgtttttcacagtatttgtagaatttccctacactttagacatttttgagggaaatatcattatagcaaagtctgaggtattaccaccaggttaaagattcattttgtctaacttgcttggacttagatgctgtgagagtgatcctgctctagcggcttgctctggaggacagaggctataggaagctatctccttagacagatttctgagtctatgtcatggcagtcccctatcattaggtattggctgaaaacaaggtacttatgtatacttaaggaacatcactatctccatttgtaaatggacattatgatattagcttgcgaaaaacgtgcacatctatttgctgatagttctgtgtgtgatctttatccctgtcacaaagagctttctggcttgggacctaaaaacacagtgacagagtatcagattttgtatgttttgtttatgaatgtctttacatataagtgagaagccaagcaactatccatgtatagaataactctatggacagttactgatcttgttctcctgagataaagttattcttacatatttacttaaaattttgcatatgttttttatttaaaataaataaagtaatcagagatgattgtattactcaacccaaatgactggccaactgtattgctcgtgtctctggaatgagataaccaagtgaagcaagccagtaataactatttgagcagagtttccattctcaccacatagctttataaacatggtttagcctagggttagtcagcttgttccattttagaagtgaataagtttgcatgtgtgtgtgtgttatgtatgtgtgtgtatgtttgtgtgatgtatatgcatgtatagtggggtgtcttaagaagacaaagatgtggttgaaaatgaacttattgaaatacagactatttgtttggaatttcattaaagctccacttttctctcaagactgtgtagagggaactagccacccaaagaaagagccacacagcagagctgtatttagaacagtgaggtcatcactatcacattcattgtagtgatgcacatgtctccagatgaagtcaatgctgaagggggagaagcaacatgtttgggacagagagtttgaaaatagatgggttgacttttattactgttacttctttgtgatgactagaattgttgttttccatcttttaatgcttaatataacaatatcaggtttctttgtaaatttgaatgtttctttagaaagcattctgtagcagttgctgtagttatggggggaattctgtcacctaacagaacttttatagtttgtaaagtttaaaagcattataaaaaatattttctcagatttgatgcagtatataaggcatggtttgggaaagaaatcaaacttagaatctgcctaagaaaatgtaggactagggtactgacaatgcttacccagggtggagcaaagaacacaggctcagtgcgctcaagtggaaagagacatcttccaactggtgaagaccacccagggactctaattctgatgtgtagctgcagttctaaaagctggtgtttgcccttctcatcccacaacttaaagaggactatgaagaccatgggactttaaaagagcagccaccccgtgatctaaggaatactccctcaggacaggactccacagggagccatggaagtgtccatggggactatgtcttaggaaggtccccttgggaaatattagtgaaacttgttatttctataaactggatccatgagtgggtacgttagtagacatgcttaccctgagtaaataaataagaaggatttgacaggactgaagctttaaaaatagtagttaactttgcattttgacttaaaaattagttttggggtgaagatgttaactagctggtctaaaaaccgttctacctttacggttaatatgtttctgcattaaaagtggatatttacatgttttcaacaaggtgagagggtcagagtaggtcagtgtccttaaaatagaggagtcagaaaagctatcgctagaagagctacactgtccatggcccccaaagaggcctctagaaacccccatacttcttcataagtctgttccttagagcagctgctgagcaccatgggaagctgggtagtcacctcagctaacttcaggtcatgtgatgcaataggaatttgcactcccaacgataaagtggaccttgatttttttttttttttttttgtaagaatggctttttggagatggcctgaaatagtgagacacacataccaattttcaaaaataatgcccttttgcatggtataccatgaaaactaatgtgggattcatctttttttctgtgcaagcatgtctgtagtgatcatcaagctgagttgtgtctaagaatcctctagtgttctcaggaacatgttccataaagtcctcgtttagaagaggcagcgaaaccccaaatctgcatttttaataaggactttcatacacatggttgacatggggcacagctagacaaactgaagccagaatcctttagtccacatcacagctctaccccttaatgtttttggaactttggtcaaatttaaccttcctagacctcagtccgtccatccgcataacaaggacaatgctatttctcaggttctcagtaaggacgactcctggttaatcaaggccaaatgcttaaggtgtttcccagagtgatcattaagcttagttctgcttatccggccaagccaacaagttaggaatatcctggaatagattatttgaatcacattgatttactgttggtataccactgaacacaaccgagagatgtacaaagtcggtatgttcgtgagcaagaagtcatttaatggagtaccataactaactatcattgctttcagaataaaacctgacctttcacctggtgtctagaacgctacttgctttgcctcataccttcctcttcgtcctcactgcatctagtgcatctagtctgtctcatggacattcctccatcttttccaagatgccaggctcctagcacaagccctgtgtgggtgtgctccttatatcagttcattaactttgattctttggtactttgaatactggctgattgcactgcttcttagatatgcttcctggcctcactaggtcagacccactttctgtgctcattgcacatatagctcagatctctcctgcatacccacaggtacactttattatgttagttggctgaactcaaggctgagagctgagggcagaagccgtgtcacttggttgtatcactagcctaaattcctgacacagtcaacaactgctgaaaaatattgagttttgtttgatgaaggatctggggtgaaatgacatgtttctgtgtcaaacaagttggatatttggatcttttcaacaaggtaagagggtaagagtggatcagtggcattagaatacaggaatcggtaaagattcctttctaagtccacagtgacataaagggaccgagtggaacatcagggtccatagtcttcaaggagcaaatctaatgtgatcaaaggcagatctaaacaccatggaatggaagctgtgggatttgggcaggtggtcactcactttaagaataaagggagctcagagctactgttctttaggaacaaaggatgctgtgctaagcatgtaacttactttgctagcagacccagagacatccaatgagccttctcagcctcagccctgtcaaaaacacgcttcatgtaatcaccacaacagcatcatacttgcaaagacctttgtggaacagacagtttgccttgaggatatagtgatgctgatagtgacaacagatctgcttagaccttggcttttttttttttcataatgtcattttttatatatctatacatgcatgtcagagcacagcttttttcatgtttgtcattttatgcatatgtaggcatgtacgtgagagattgatgtcttggtttcccctctaaggaacctgacagttccattcatgcagccattcattgctcagtggcggcccctgctgctaaggagacagacagcagcgcatacggcatctgacattaattctgatcatgccacgcgtgcaaccaggagaatttaaagcaagcaggaggggaagagatgggagagatgaaaatgtgctgagaaaattaaggaaggtctctcataccttaggtgctttggtgaaatgctgatgcaagagagagcttaacctaaagactttatgtttacaaaatcctccggattcgggcatctcaatatttaaaggcttgctagaaaccaagacaacactttctgagaagcaccagtgtaaacttttctttggggttttccaaggctattacgtaatgatttaaagataccccccccccacccgtctgctagattccaagtttctgtggatttgaattaggtgtggaggctctttaggttcatctgcatctcgagttggaatcagagtgtggatcctccctcgggacccctgctaggatgaaagcttctctctctccctctctctctctgtgtttctgggcgtgtgagcatccccacagcacatgatgtattttacaaagcaaggcagctacgtagcctttctgtctaaaaactgtagtggagagaaggtggaagtatgcattacaatcaaataaaagtagaggggggcagagatgagattgtagttgattatgggtctggcagcagatgttctacacgaatccaacttgctgcagccagtctgtttccatggcaacagaatcagtaattattgagccctggcactcccccccaccctccttcctaccaaggtggaggctgatgaatgtgaactatctcccgctccttctcggtcctcttctttccctcgctttcttcagtccctcataggaaaaagtagaggtatcgaggagaactaagagagggagctctttgtgtcttgacaaagattgtgagaaattaaattgcaaaggatcctttaccttgtgatactaccagatcagagaaaagctcttcccagaaaagccgatgatctctgaagatgctaaataaatgagcaggagtttccctgaaatggaagctccctttgattggctgatcttcccacaactcctgccaatcggagcacccctgggcttcagctccataaacataagcaaagctccatgcttattcttctggacttggagcgtattccattcgaaggtgtgcagcgggtctctgttcacatggctcaactggaaacctgtttcctgagcaagcttactgggcagccctctggtcttccggcacactgtcctactggggcacgactctaagtcatatttgtggcagcagcttagacgcagtatatgtcgttggggatgatggacttacggaagcttggtgagtaaatctttgtcttacacatctgtgcactggtattagcaggctgagatagaatgtagctttgttctattgtctgccaagaaagccgagttggaaggagcacatggaagaacacccatgcaaaggttcccatgatacgggagactgcttcaaaaggcttcctgctttgtttgattccggtcggatttgtagttgattgtgaattatattcggatgttgacaatctagttaggattagtgtgaggagtggagccgtgtcttgtctccctgggtattgatgcattacaaagaaaatgtgtttaaaaccacattagtaagaattaaccctgtggagtggtcaaaaggaggaaacggcatgagcacagagcttgaagctgccaggttgtatagctgacatttgcatggagaagagagatgttgttagaatgatctgtcactcttcaggatcctggccacaggaggaagcatctcttccccatgtactgctgttctcagtttcagaaatgtgccaccgggctaggtcgtgtccttgccccttttcaggaaccagtgtccaaactgaaatgtgctttttcaaatcaatgtcagagatgagttgagatgtgggcagaaagattttagcagccagaaagcatgtgtgaaagggctctgtgttacatctctccaacctcggaaacccaggggggttgcaaagttacgtttaagcactggctccgtaccagagctggagtgctctgtgctagtgcgctgttccttggggtttaattttctgataccagtgatgaaatttgccgtgtttagtgatcacagacaggcaagagagcagtcctgcgaatgagcagtgaagatcagcacagggagaggaaaggtcactgcccttgcagacctcctgccacaaacttaaaaatatacacgtcaagaggaagcccgggcacaatgcagaattccacaggagctatgatcttggcaagcatgagagggaaggtgttgccttcagcttgggtgcagagcgcagggctgaacttgagtttccacctctgctgaagatctgttctcttgtctctgatgtttgaggcttcgtgattgttgctttttgcaagaatgtgatttctgatcttatgtcgggaaagtgctgtagcatcattggaatcttttatggggctgggggatgaagcatcatcgctgagtttataaaggaaatgatgcgaaatagtggcacatgggaatgtgttgatgagaacctttaatagactgtccttttacttgaagagtgtcctggctcttcacgtggaggtgaaatggaaatcgctgtgtccaaagtgggaatctgtgatagactgataaaggcacaaaggaactgggaaggctctgcttgtctgagacttgggagagggcgctggatggaacagaccctctgctctgtgtattggagagagaggctgatgctgggggacagtgaggatttcctgactgtggctgacagtgcattgaggacctggccatcaagcagtgcaatgacctgttccttagcggatgtcctctctaggcgtgcagcctggcctctagtcctgaggctgcgtatggtcagatgcattgagtctcccacctgattagaggtgcatttctctgtctgaataaactcttcctgaagcttcttgctctggcccccacttgaggacaggcacaggtttgaggaagactggttgctcgtggatccatgttcaggaacagtcattttagagtgatgctccatccaccgttggtcccttctctgaaccagtagtatcactttacagagggagggggtttgctggcacctgttggcaagaatgggagaagaaagcagccttttatggaagaagtaaaactgtttcgagatcacaacctatttttggatcctggaactcttttagaaagctacctgcccccaagaaaatatattttgcataattctctcacactttgataacaagctgcttctggggagaaggagatacctgtcctggagaatagcaaacaattttaggcactgagtcctatcaacttttttctttttcaaatgtgagtactaactactactacatctccctctccatcaaccatactggtcttagcagcgaggctgacttctgaatgaggttttcaataccatcagtcactgctggaattaaatgtcttgaggataggactgcagctcaatggtagagggcttgtctagtgtgcgtgaggccctggatccaatggctgcaatggcattctgtctcctgagctcagtgaggtgttgacaaagcagagttgtgggattcatgctgcagttgttccttcagtgttagggcggagactgtgtctggtgactattctgctcattcctgaaagagaaagctactttccactgctcttcctgctgtccatagactatggggaattgggaaaatcaaggtacagatgaagtacaatacacttagttaaacttctgaggagcgcaaagttatacagcaggagcgtgaaaggacatgaatatgttaactctcattcttgaaattaagtattgagaatttgaacaacaattcttcacttttcccattaattgtaataaaattgatcacatgatgattgctaaccttcgattgtcactctgtgcccagtacaattatgtgctttagaaatggaagaataatgggatcctcacagtattgctaatttaatatattttattaattatttgagagtttcatacaatgcattttactcataccccccccccacttctccctctaactccccccagatcacccctgatctttttaatccctcccaactttgtatcctctctgtactctttaatgtgctgcacacatactcatgtgtgctgaatatggtcaacctactaggggctgcattgttaaagaaaactgactctctgaccccaaatgccatcatctgtctatagctcatcagttaaggattggagctcatgagcctctctccatccatagtagaatgccaaatggcttgctctttgctcttttgaaggtcctgtgtgggcagccacagttgccgtgaggctggcagtgtagtggggtcctggcatgtctacacaagactgtttcactctgcccctctctgatctctggcttttacagtctttctgcctcctcttcttcaatgtccttgagcattgtttgggggagtgtttcagatgtagaaatgtgctgtttgtggatgagtgttccaggtatgcatgttactttaatcagcgatagatttctgcattaattgctgtccattgcataaagaaacttctctgatgagaactgagagttgcagtaacacagggaataaacacacaaagtaacagggaatttgatacacgtccatttagcaaaatctcactttggtttttgttgttgttgttgttgttgtttgttttttgtttttgtttctcaagacaaggtttttctgtgtagccctggctgttcttgaactcactctgtagaccaggctggcctcaaactcagaaatcctcctgcttctgcctcccaagtgctgggattaaaggcgtgtgccaccactgctccccttaatctcattcttagtaatctcactccaggggcctaactggactttgagggctcggggggaacagagtcagtgtctcgctttctctataaaccagggctggcctagaattcacagagatccagccccctttgacttctgagtactgggattactgatgtatgccaccgtgcccagcctgggctaattttaatgcctgtttcatagattgaaatattgagccaaccaaatattatagaacttgcccagtttatccttctaaaatctggtaagctcctggtttcatacattggtttattaagtgctgcagtcaccgatggaaagacggtgagtagatgaggaagaagtgtttgtcagtttgtctgtctgtctgattggagtcagcctgctgaaggctgaattaaacagccatcacaatttaaatcaaataaaaatggcactctgaaatggctggttgtaggactaataataccattaaggaagaatatttcgacctaagcaagctaagcaagaactctcaccaagtgcccctctgggtagcccctctatattatcatataatgaatagctgctgccgtgtgcacatcactggattcagtgatgtaggaaatgagtgttaccaggatgctggggagaagcttcagcgtcccagtgttgcctgtatccccttagcttgtgtttcccaataatgacttgcagtgaccagagcagttgtaagagtggagcaggaagcctggggctgggcttttcctctgcttgggaatcacctgagctctgaagctttctgaagacccatgaatagaagcaannnnnnnnnnnnnnnnnnnnnnnnnnnnnnnnnnnnnnnnnnnnnnnnnnnnnnnnnnnnnnnnnnnnnnnnnnnnnnnnnnnnnnnnnnnnnnnnnnnnnnnnnnnnnnnnnnnnnnnnnnnnnnnnnnnnnnnnnnnnnnnnnnnnnnnnnnnnnnnnnnnnnnnnnnnnnnnnnnnnnnnnnnnnnnnnnnnnnnnnnnnnnnnnnnnnnnnnnnnnnnnnnnnnnnnnnnnnnnnnnnnnnnnnnnnnnnnnnnnnnnnnnnnnnnnnnnnnnnnnnnnnnnnnnnnnnnnnnnnnnnnnnnnnnnnnnnnnnnnnnnnnnnnnnnnnnnnnnnnnnnnnnnnnnnnnnnnnnncatacatacacacacatacatacatacatacatacatacacacacacatacacacacacagacagacagacagacacacacacacatacgtacatacacacacacacacttacacacacagacacacacacgcacacacacacagacacacacatacgtacatacacacatacacacacacagacacacacacacagacagacagacagacacacacacatacgtacatacatacatacacacacacacacacacacacacacacacacacacacacacacacattgatgaatcaaccatggccccatagaagagtagtcttggaaatcatttgataacattgttttcaaagcacattctaccgagttttggggagagctgatggctgtttgcttgttgtagaactcatgtggcagatggatcgtcccctcccacacccacagagcatcgccacttctgttttataagctaccatccacaatggaaatgcattcataaaaaatgaaagagaaaaggttagcttaccaagaagaaaaataaaaactcttgaccttgtcaaaatttcccattcaatataaaaagcaagggatcagtacctggaggaaggccgcagtgccagctggtatggaaatttatagtgggtggcttaacaaacctgagctagctgctgtctgtgcctaatattctgaacattctagcatgccatactaggtatgtgtgaatgttttaataattccagaaaaacttatgttggcagatatttttacagaccagtgttctccaatacaaagtaaatgcaagttatatatgagttaaaagctgttcatagtcaccttaagaaacaggtcaggtagtttcagtaagatattactaaaaccattatgtctgacttgtcattttagtataagtataaaattattagcaaatatttatattgaatttttcacatgagatctttggtattttctttgaattcttgtagcccaacccattttgagtatgggttttcacttttatttttggttttcctttcttaaaatgtttttttttttgggggggggaagcagatttgtgtgtaagttgttccacacacatttcctagtaactgaactgagtagttggtgggttttcttttgggggggggggnnnnnnnnnnnnnnnnnnnnnnnnnnnnnnnnnnnnnnnnnnnnnnnnnnnnnnnnnnnnnnnnnnngcatagttcagtctggagtgtcgtagcactctgagcagacactgagccattcactcctgtgagccgagcatcatgctacagtgtctgacctctcttccttccatgaggtatctggaggactactctggggacagagcctggggtctgcctttcataagcatgtgtcagcattgcccttatcagggtcttatcagccacatggcaaacttgccataaatctagttatgtcttgatcttgattgcactgttggacatggggaattaaaagcatgccggttccttttgctaaaaatcaaaacttctccttctatagcattttttcagtccctaaatatcttgtccttcaatcagaccttccttgtcctagtgcttttcctactattataaccgaacccccaagactaggtaatttgtggtgaaaagaaataaatctcacagctgtagtgactacaaagtacagtgaggtgccagcatttggtgaggccatcacatgagagagcatgcgtagtctattctaccttcttccatcttgccgttcctactacctatgtccttacatagcctaaattgcctccccaagacccaagtaatgtcaacatctgaattaaaggatcaaaatcttaatacagggactttggtaaacacattcaaacactactagtatttctcaattcaggataaaatgtggatttaatttcaattaaatgcaaaccattctcaagaaggtaactccatggcaaacagataattctttacaaaggtgagtacaaatgaagaccaagagcagtttaattgctattatccttttcaattcctcagttggttttgctaaaaagtattgactttatagacttggtcttaaaattcttaccttcgttcaacaccacatgtttcctaggtctctatcgccttacaaaagatattttaagtggaaaactaaccttgggtggtcaaactctctaataataaagtaaaaaatatactcataaggttccttagcctacgatggatgatttcagctaaatctggtgactggaagaatagagttctctctaagctctgtcctctcccacctccctgaaataaggagcatcatttacagttacacacacacaaaagacaaaattccacatagtgcaataatatctgaagttcagggaaaccttcgggtccaaaagtctccatctcttgcatgtagcacagaatctctacggagaatgtctagtgtgtttcaacattaaacaggcatttgttgaaatgaattgtatgttttccgtatgacttctttgtcattatggcttgactggaccttcttccctaaggcagcactggcaggcttggcaaaggaaattttgggtagagttgattctaactacacaatgagtcgctttgcatatctgctggtatttgaccaagccaagggctaaaatgatggaaggaagtattttgggatttaagtgagtgcagaggcacagggacacaggctgtctatcacacacataagattagtgttataacactaatctcagaattacttcaacgtttgaagtctgcttatttgctgcattatcgaaagcaacctgagagattcctgaatccaggactagactagttcttacagcacaaatgtataatctaaggccttaggctatgcctctagattattagctaactcttgcaagttacttgacttatcttcttcagcatctttatatggataagggcaggtttagacctcatgatgtgtatgcaaagtaactatcgaattttctgaatattctggacctatgttttggtgattctatccatcatttttaggatacctagccagagcctcagaatccttcttaatgcagaagtataccactgcagccaaaatcaacattggctaatagctaaggtagacttttaattcccgtctcttttttctactccgatgccatggtcaagactctgtcatggggcacacagggaaatgtcatcagtgctgggcttcagagatattgtggtgtcagctctaccctcatcctcttgctcagctgccctgcggaggtactgcaatctgacagggagggctgtaggctggcactttgggagctcacttttctttgcctttgagctgtaagtgatgagagacctgtcaaggaaaacggttcgctggcatcattcccagacctggaagcataatgaaataaagtttcattctgactcagttgggattcttgccgctgaacattggagatagcatctggagtatttctaccatccactctcctggtggaaaagaagcattcattagttaacggaacttggacctttttactggcagcccaagtcaaaagcccttggagcaactcatttcaaaccagagtcaacccagaccacaccccagtacatacagtagagcctcccctgtcctgtggaccaaccacttgaaatgcatatttcagaggtttttaccaagaacagagagagtggtatcaaactggctctgaaatccagccacactgctcatgttctctagagtcaagataacttctcagtgccagaggttctgcacttgagagttggaatcaaggcataagaacatcatttttttattcccttgggccttgttccgacatctctgcaaaggccagaccaaaaaaacgcatcttcgggaacatcctctgccttctctgaaatgtccagagaactgtgtcgatagactttgtaaattctctggaaccttgggttccttgcttgtaaaaatggaagcaaagacatcgttcttatagaaaggaagaacaataaaattaaagaaaagcaatgtgtgtttgagtatcgctatgcagttgtgtgtgtgctgtattgggtcaagcagggataattacactcagttctggttgaagctgcctatttgcccacatcctgttacagaatggctgctctagctgtcaaagactctccattctcagatcatttttgtacacccctatagaaaccctctgctcagaatagcaatggaggtcacgcagacagagctggagtgagacttatagacaggatgctgcagtcaggccagagtttagccatgagacaggatgtaggctcctctgtcattgcctctctaatctgtaattttttcccttatgttactactatactgatactcctatcactgacatacacaaatgtttacagaatgctacatgtcttgtggactataatgtaagatattatataaattttctttcctcccaaatctcctgtcttctaatatctgggccttgtttattacagcagaattattagaagcctgtttgtgaagccaaaacagcagcagctcaggtctggtgctgtttccttccctgactttggaagccagtcaagatcaggcttgtgttctggagagatgctatgtgacattccaagacgctgtgacctgcagtcactaatcagtggctttaacatttataagtcaggatgttcttggtgtacagagagaccggaaatgtatctgatagcctggccttggtcatcctactctctctgcacctttcttcttgaagacagagccaagctttggaaatgcatgctttcagttgttctgtgagcaggttcctggcctcttccctcttgcttttctccctacctcagcagccacatacagccaaccctgatttgtgtatatgacagaagaggagaagaggtgatatcaaactctttatctctttaatgtaagcccacgaaatgctagaccttaaggaagcctgagctgagagaacacatgcagacaactggagtctacctgttttgacagcctaaggcccacttagctgggcccagtgggcctgggcaggaagaggaatttccaaagcttgactctgtcttcccttattacagagaaggaagagtgccccattgaaactaatgacatgccctgtcagtaggagcaaggtttacattttcttcctctcttagtttattcaccaactttgcttaatgccaaccacttaccagatatcaccacctcaggatcaaaggttatggatacctgtggattataccaccttgatatttaattttttcagacaatcaacgtttctgatttctcagaatatggaggttaggatgagggaaaaaaaaggttgtacaaatcacttttgcttatatattcactaaggcatttgcttatgtgttcatttccattttacttaagtaacaggaaaaaaaaaacctacttaaataaaatagggccctgataggagttcattagaaaccaacctaaaagtgatatatgaacaagctggccaatacctgtccctgtctctgcctttccttccaaataactaaggaattaaactgtgaaagtgaacttaaggcatccgctggcctagtgttacatagcaacctacacgataaagcctggatggacccaaagcgctccactataccaaagtaactgtcagatggttaattaaaaactatcctgagagaaaatgtatagccatggtggtctagaactgttgtgattccatataacctgggggggggtggggagtgtgaacaacaattgtcatgaaagcctcctgtcccaaagtttgagtactgcagctaaaggcacagcaaatgcacgtttgtggcctttgtctctctcatacctggtagtaccatcctttataaggttaatccctgtcatgtgcttctaggctagaccaatgtcagaaacatggcccgagagtaggaggtttttgttttctctgtgctggatatcttacatatcttaagcatcaaatcaagggtcccatgagtcccatgactttctgtatagctgtttttctgcatctctgagaagtagctgatgtagacatggggccctctttgtagattatcaaggagtagtctcttaacttctgggcttagtcatattgaataggaaaattcttcaatagttggcttgcctacaagccagcgtggggtctgaggtctggggatccgaggagcagctttccaggaaggagaatctgacatcttgtatgttcagaactggcagaaacctgtactgaggcttttagcatcagaggggatgtttaaaacctattttgtaatctggatggatgctacaggatgatacgctggagtcctaaccttacaatgatcatatttagagattacgttaaattgaaatcaaaagatggcctctagttcagtattattgatgtttagatacaaaagacaagcgtggctgtccagacctgaattcatagaaggaagacaatctgaaggcatgcaggaagaacacagccatctactactctgaggagcaaggctggggtctccccagagccctcaggaggaagaaagcttcctgagtctttgatctcagggtcccagcctccagagctatgagaatggttccagttgttcccatcacacagtctgtgatctttatcctgctgtcttggcacacagctacagtgatcctgaaagcagagcttcttccagtgaactttcctaagccccatgatttataatattttcacttactgcccatgagaatacgtttgtcttgctccccagagtctctccaactcctaagggcagggctcaggggaacagtcaaaatcaagtctgagctcctgggtttaaatgtgactggctgtgctacctttacctggtggctttatttgcaaaatcaaagttggaaggtatatatggtcagttggcgttgctgcttcagggttgtcttgaggcagaacctcacagcaggcagctcacctcttccatgcagtccaggagccaaacccaggaaactatggcattcacctttgggctgggtcttccacatcactaacacaatagagcaaatctgctcatctgttaggatgcagttttaattgtcaacttgacacaatccagaatcacctaagaggatcttctcagtaaggagttgtctcgatcaggctggcttgtgagcatgtctgtgcaggatgcccctcccccccccccccgcccgcctttcaatatgcactaacattttagtattttaatcattaaactgaattcttggaatatattttttctaaaataattatacaaaacagcacccacttcaaatgtcgacacaaaaggagagtaaagaagttttagaagtgggcctttcactcgtgaaatgtgaaatgaattagagaaatgtctgtatttaaagcagtgattatcaccctttgctgcatacagtaatcaccttgagaagagctaacaaatggaaaaacaaaaattggaagagtaatatggacattataaagcccaaatgcttaaagagcaaaacagtcatcttatagattttaaagtacaagctattaaataaaaatgaatctttgcttataagacagcttcatcaactttgaaaatgaaactataaggagacaaaacacaatacggctgtgacgactaattaatgattgcagtagcatgctatgaatatatagatttttgtggttaataagtatcaataaatatgtgttaagagtatgactcactgtaagatcgagaattgacaaatgggacctaatgaaactccaaagtttctgcaaggcaaaagacaccgtcaataagacaaaaagaccaccaacagattgggaaaggatctttacctatcctaaatcagagagggggctaatatccaacatatataaagaactcaagaaggtggacttcagaaaatcgaacaaccccattaaaaaatggggctcagaactgaacaaagaattctcacctgaggaataccgaatggcagagaagcacctgaaaaaatgttcaacatccttaatcatcagggaaatgcaaatcaaaacaaccctgagattccacctcacaccagtcagaatggctaagatcaaaaattcaggtgacagcagatgctggcgtggatgtggagaaagaggaacactcctccattgttggtgggattgcaggcttgtacaaccactctggaaatcagtctgacggttcctcagaaaattggacatagtactaccggaggatccagcaatacctctcctgggcatttatccagaagatgccccaactggtaagaaggacacatgctccactatgttcatagcagccttatttataatagccagaagctggaaagaacccagaatacccctcaacagaggaatggatacagaaaatgtggtacatctacacaatggagtactactcagctattaaaaagaataaatttatgaaattcctaggcaaatggatggacctggagggcatcatcctgagtgaggtaacacattcacaaaggaactcacacaatatgtactcactgataagtggatattagccccaaacctaggatttccaagatataaggtacaatttgctaaacacatgaaactcaagaagaatgaagactgaggtgtggacactatgccccttcttagaattgggaacaaaacacccatggaaggagttacagagacaaagtttggagctgagatgaaaggatggaccatgtagagactgccatatccagggatccaccccataatcagcatccaaacgctgacaccattgcataccctagcaagattttattgaaaggacccagatgtagctatctcttgtgagactatgccggggcctagcaaacacagaagtggatgcttcacagtcagctaatggatggnnnnnnnnnnnnnnnnnnnnnnnnnnnnnnnnnnnnnnnnnnnnnnnnnnnnnnnnnnnnnnnnnnnnnnnnnnnnnnnnnnnnnnnnnnnnnnnnnnnnnnnnnnnnnnnnnnnnnnnnnnnnnnnnnnnnnnnnnnnnnnnnnnnnnnnnnnnnnnnnnnnnnnnnnnnnnnnnnnnnnnnnnnnnnnnnnnnnnnnnnnnnnnnnnnnnnnnnnnnnnnnnnnnnnnnnnnnnnnnnnnnnnnnnnnnnnnnnnnnnnnnnnnnnnnnnnnnnnnnnnnnnnnnnnnnacgccagggccaaaaagggggagtgggtgggtaggggagtgggggtgggtgggtatgggggacttttggtttagcattggaaatgtaaatgagctaaatacctaataaaaaatggaaaaaaaaaagagtatgactcactagtcacacagctttttaaaaaaatttgtagcttacttaactaaggttaattttttttgttgagtcaaagaagaaaaccaaacatttactagaaagcagttgaaaaatgttgacagtgaaaaatctcctatgctgaaacttaccatatgcagccaaagctgcctccagctcacacactgataaccataaagccactagttttgagaaacaataaaaaggtaaactaaggttgaactcatgttgggaactaacagtagaagtacctaaaggatataagaggaagagtgtaactataaactcataatagaaaattaaaaaaaaatagattcagtaaacaaagccaagatctacatctataaaataagtcaatttagataaagcattggcaaggttttcaaatcaaaagaacaagtaatttataatggaaattgtgaaaataaagaggtgattaaaagatcgtagatgattctagtggatgccattacgccgctgtgcctgaacatccgctgtgcctgaccatgctcactgagcgtaggcctgcatatgtgcagacacaagcggaataactgcaggctacttgagaatatatgttatgtgggacaaaacacattaaaagaagtgtatgaagtcaataacttgaactcaaagaatctattctttttctctactggcattatcattaacttaataatatctttgtagtgctgaattttctagaattttggtaaagattcactataataaagaataaggtcttccaaaaaaaaaaaagaaagaaagaagtgtgtgtgtgtgtgtgtgtgtgtgtgtgtgtgtgtgtgtgtgtgtgtggtgtatattgtacatgtgtgtatgtctggtgttcatattgtacatgtgtgtgtggtgtgtatatgtgtatgctgtttatatgtatgtggtgtgtatggtatgtatctctctttgtgtgtgtgtgtgtgtgtgtgtgagagagagacagagagagagagagagagagagagagagagagagagaggtgtatatgtgtgcacgagtgcacggatgcactcacagccactcatattcgatggcactcatggctatgggacagctcccaggtattgggcgtctcctgcagtctctggaatctgggaattaagcccaggccatcaagcctgcacgcaggactgcacgcaggatgccctccccacacaaccatctcaccagccctgaaagatacaaattctaaaagagtcgtctcccactttgctcttccacatacacatggatatagacttatagaaaatggtggtagctttcaaactttttcaatgttctctaatctttgacctttcttttttcttttttttttcttttttaattagatattttcttcatttacatttcaaatgctatcccaaaagtcccctatacctctccccccccctcccctacccactcactcccacttcttggccctggtgttcccctgtactggggcatataaagtttgctagaccaaggggcctctcttcccaatgatggccgactaggccatcttctgctacatatgcagctagagacacgagctctggggatactgattagttcatattgttgttccacctatagggttgcagaccccttcagctccttgggtactttctctagctcctctattgggggccctgtgttccatcctatagatgactgtgagcatccacttctgtatttgccagggactggcaaagcctcacaggagacagctatatcagagtcctttcagcaaaatcttgctggtgtatgcaatagtgtctgcgtttggtggctgattataggatggaccctcgggtggggcagtctctggatggttgatctttgacctttaattttaaatgagggaatttatgctaagaaacccacaaagttgaatacatgttctattacttaagacatgtgaatttcagaaaactaacactgcgggatcatccagatacataactgtgtaattataaacataaaactaattctggaagacaccaaaccacaaagctaacttgtttgtttgtttgtttgtttgtttgagacagggtttctctgtgtagccctggctgtcctggaactcactctgtagaccaggctgccctcaaactcagaaatccgtctgcctctacttcccaagtgctgggattaaaggcatgtgccaccactgcccggctgctaacacaatttttaagtgaaggagtcatactagagctttactgtctttcttgtagtttttacattctccaaatagtcaatagtaatattattttttaaagattttcttttaaacttttatacatagagccctgcatgtgtgcctatgcaccacatgcatgttatacctatagaggccaaagagggcgccaggtcccccagaactgaagacagacagtagtgagctgccttttgggagctgggaattgaatcttccgtttccttttgaagagcagccagtgctctagaactgcttagccacctctccagcccctaaattataatatttttaaattgatactaaagcaaatgaagaaatgtagtataaaataaagggaaagagcatacagaaagcatgtcaaactgaggtgtcactacatctctttgttctctaggtggtttgtctgtttttcattccctggaaacgtctgccaaaggcaagagtttgggaaagatatgagctgagacactgtctccggcccaaacctcagatctttgataaccaccttgtttgcagttttggtcttttattgttaacccaagaagacaatcagctgcttatcctcagactcatgggcctgcacctagaacactgtctgtcctcacctacccaagaacagtggcttcttttcctctttggtctgcctgtcctttctgtgagactgagggactctttcaatagaacagcctccttttttccagatggacaaatttggccaatactccccctagtggccatttaggaaatctcctggactagcctagagtactgaagccagaggagtacagtgacttgttaatgtttgactgggctccaactccatattacggcccacaaatgtgttcttttattttttttcaacaaatagtgcaagttatgaaatattccagttctcatctaatgacctggattgtatattgttttagaagagagatgacgaggaactccagtaaactaaggaagtgtttgtttcctacagtacagttgtgtaaggactcgattctgctgtgtaccatcaaggcgtgtccatcacagaaaagccagtcaccgggcattgtttcattaatctccctgcacatttttaagcctatcaccttggattttccagttgccagccagccaacccactcgagacagcctgcggatttaatcagcacgctgcttatcatgttttccagatggttaatgggtcccttaaataaagctggccctaattctatctggtgtttctattctggtcccctttgtagaataatttgttttatggtccaagttgttctttctttattactctgtagtctttggtgatctcttactaccacttctttattcaaaactatggcatattaactcaactcattgatcttgatttttacattcagagaagagaccactcagatgaatatcaacacagtaccctaattgtttaatatcattattattatttatttgctattattgttatcatttatcattgttgtcattattaacattaccattactcgtgagatttagagactaggtttgctagcattattgattgagggagggaggaaggaaacacctttatgttgtggaatcatagattagcagtttctttccattgcagattctgcctcaggaggaacagtccttgtcatgtgaagcagtgctatctgggaatcagtacatggattccaggttttagcaatcttccttaaagatttgtagtcttagtgatccatattacaacaaagaatcccaagtctaaatagctgagccaactgtagattcagtctgattcccattccacaaatggtttcccaggtatacagccagtttgcactgaagtgacattaaagtgcatattggcagaatgccacggtgtgtgacttccacagtaataaatggctggaaggaggcaaggtaatgcaagatttcaatggtggtgcactctgaaaggaaggaagccagagggtctgggaattagtggtggagctacaggggggaaaatacagctctattacagcacacacttgcctcttcttccttcccattgcctgcctgagatgattgggccgagtttaaaaataaatgaagtgtattcacgttttccttcagaattttgctttgaagggattctgtaaaggaaaaagatggagtacttacatgagcagaatgcagcaatcaagacatgaaagcataggccttgtagatagcaggtgtacccttacatggggagagacacatgcttccaattaaagccagtcgcacaggtgagcatgttgcttctgtacaatgttaatgattggataggtgatgctgacatgatgacatttttgaatgggttctgctctcatttgtacctttctactgccatctttatggactgaactatacagtgacggggactgaattttcaatagaaacttaatgtcaacttttagtgctgactagagatgcgattccacacacacccaggctatcatttatgttgatatgcttttcacattttattttagctgcaaaacctttatttcaaagtggaacactatccagatgcacatggagtttgtctctacaggaaaccgggatggatatctctatgatttccctgctgagctattttcccagtgccagtctctttctgcccttaggtgagctaaggaaatagtttactatgtgacctgagaagaagtgcttcagtgttcacgccttcccaaatatttacttagtgcctgtgataagccagaccctcttctgggcagcaggaacaaagcaatagaaaggaaagccaatgcctgtcttgattaagggagcagcagtcaatgggggtgggggtgggcactcctctgaagaaaatgaagggcttagaaagtgatcctgtaggacatcccacttagagagatcagcagggaaggcctaacacagaaattcagtgttgagaagagggcctgtgtagaaagctttggaaagaatgttctagatagaaaatttctgaaagtcagcaccaggtccaacactgttacacgatgtagggttagaacctatgccccaacaaagcgtgccaggctacctgtctttgataaaccaactgaaagagcaaaattgataatgaaaaacatgaagcaggtattttttttccagtatagctacattggaaaggtggacagagagatccataaaagtgcaagtttatctttgggatcctgatgtgacagtttagaaggtaagcgatatgtataagctgtcctacccaagtctcgccctacctatcattgtcttagcaccaactctccctaccaggtcagcttctctttcaaggtcaactgacaaggtgtagaccttcctccagaagacagattcttcctgctgtggctttttcttctcccagcttgagattcctgggcaggtctaatttcttgaacccactgtttcagtagcctgatagctagagagaagagtccaagtgtctctttagaagacatccatggctgtgaggtagaccaggtagctagatctcatctttgggttgtagggttggcccagtccatgtaacagggtatctgataatgcatgatatacattcactgattctcttttgttgtccaactgcttttactgtccatttatttcattatatcctgttaatgtcaatatctaaaagggtttgaggttacagctatacatggtgtatactgcagtctttttcgtttttgtgtgtgtgtgttttctttttattattaaaaattccaaccatataaaagagtaggaaggatttgtatctttaaatttttggcatgatttagatagtgcaattgagaattttaaaaagtagttcctcacagtccaggtagaaagaaggaaagaggtggggagaagaaagcaaaatgatggcttacataattatgattcatcaaaaaggcacagtgttctctggggaagaaatgcctggtgctaaattctaaatataatgtattacattgggccttatgtaagagatatcaataattctctttatgaatattgtatgcttaatatatgcaaactggggaatacaaaccgtaatcagacataaattctaccttctgagagcttgcagtttagcgaggcacacaatgaacatgcgggaaaactaggcaaggtaggaggtataaatacaagatggcttgttagtggatttagagataggctttcatgaaactctcagtcataggtgtagcttacatgcatgagactgggacaccacaggtgagaggacagaaagcagccagccaggtttgtaggtattttatagtcagaattaagcactcagtacccaggagcatgtccgttaggtctccctgagatatcagttggtgaaggtgatacttattaaatttacacttgacattgtcaagagcccaggacaaaccaaccttatgaaatttgattagtgcctttcccctattcaaatatgtatttatatggaataaattctgggtggaaatgtcaaactatatagatatagtaaaaggaaaatgcataatgtctaccccatggttcacacactcatgagcactgtacacgtggcatgtcaccctgtttcagtcgctctctgctgtgctggcatgggagcaggatgcccagtgaacacacagtgctgcagcaagcatcatccaaggtcggttcctaccactttccccatgtctatagcacattcatatttctacagaggacaatgattttcacttcagtctcttatgagtcacacttcttcccagagctcttacttaagacctttactgatggactctagctgtagaaatgctaagctatccttttttccagaagtggtacctcagagcacttagcgagtcaatgaattttgcattctcatttgctttccctgtcttgccatccaagcatccatcaatttcattacatgagcatcccatgccagagcttgggctcctttcactctgcctctctcctcaacgcttaccttgtccagcagtcatggaggacattgggtcgtatctccaaaaaagccctttctcctgcaatgcttgctggtctggtcaccttccctgggtgacgtcaggatctcctaaatcctcccctcttttgggtttcagttcctcttctaagccatagtcaatatctaacttggtaaaaatatgctctgccacaaagcttttcatgactccaaactccagacacctttctggataaatttcaaatcactcaaagtgaaacacagccctttatttctgggtcaagtcagtgggttgaggttttagaatctgggttttctctgtggttttcgggcgagcatatggacccctggttagtctcaaagtgggcaccaaggacatgctaatctgcttggattcccctgtaggattcacgagccagctacagctggaaacttctcccagccaaggcttaaaattacccagcacactgtagttattttaggaaaaatttcaaaagcattctaccaaaaagcagcctgtttgcaagtatagattagaggatcatttccatttaggaagcctaatttaattaagtgacacaatttttgaggtagtaaagcttttcctgccaagtcaggatccttttatttttatgtatctgtgtgtgcacttctgctaatgtaaaacaggtagtagaaaaatgatactgactcctagagattcctgcatgtccagctggctgccactatggtcagagcagcaaatgttctccacactaggaaacaagaggccaacttgtataagttttgttaaagcattaagttctgagttttcagttgagacattttaatgtcaggttcttttttaaaatgcctgagaatcattcattagagatcagttaagaaagaaagtaagaagttgtgattgataattcctttcaggaatgaggctaattagcttgaaaaggcctccaggccatgactgggccctgaggtgaaaagacatcaaagacaatacaatatggagacacaaatatctaaaggtttccctttaaaaccaggtgagaagtttcattactagcttgctggctcagtttacccaatggataattttatttcaataattcatagttaatattatcctacagatgtccagtcctggaaatcattcatcacatgaacttccacgacccctccccccacgcaaaaccgctaagatactgataagttatccccatcaaaaatggtcacacaaatattcacataatgtgaggaaatctctcagaatcatttttaccttttcagaaaaaaatagtctcggcatgattgcaaggaagtgggaaatttatacccaaacagtgccatgtatcactctgaaaaaaaaattattttgattctcatattttctactcctacaagtatgcatacgtacacacacacacacacacacacacacacacacacacagtgaaaatgagaaagataggtttgagtgagagttaaccctgagagggctaggtctggcagcaggaaaccaagcaacctcttcagttgcctttagagcaatctcacaagcactcataatctgtagtcaccaacagaccagtcccagtgatgaaggagaggtctgacttcttatttctttttaggggtcacaacatcatttacaccacatgatagttcaatatagcaagtatagaaaggagcatggaggagctgggtactataagttgtcaagtcacagcagggactgcttatctgaaagaacttgcacaaggcttatgaatcaggcggtggaggtgagcctaaaggtacaggcaggcatcttctaacacttcatatgtcttataagaaaggagctacatacatatcaccaaactgttgcacaaaagaaagacaaatgtaaactatcgtgattccttaaagttaatggtgaagtgtttggaaaaggtgtgtgtgtgtgtgtgtgtgtgtgtgtgtgtgtgtttgtgtgtgtgtgtgttaagacaataaaataacattttattttactttggacaattaccttgaagtagatcaatgggttaaagttctctagattttttttatatgtcatgtaatataaacacctggagtggtaatatcactctaaacaatagagatgagattttttaaaaaaattatttctgtggttttgcttcctactcaatatatgccatttccacaatgggtccctgtgtctgtttcccaccatgtccccagagtctattttgtgatagctgcaggtataaatctgactggtgcatgttgcgctcctccagcgaggtatgaaggcatgagaattgacccttgacttaaaagaatcttgtgatagaaacaaagacctctttctaacccacttacctgattcatcaaattattattatgccatgaatagtggcaatgagatttttaaataaaagacctattttgtcttcctatatatatatgctttttgttttcatgcttcatgcatattctccattcctgcattccaaaattttcacaaatatgtaagttctgtatatgtgtgtagtagggtcaagtaggctattttctcaatcatctctaagtatgtaaaacaataaaagttagttttcagcactgtaggtagagatgagcttcccctgtgtgtcctgagctctatgcagctgttttgcagcaggtaaagggacgtccacggaatgtgagtcaggtatgtcccagagcacagtgctgagttcagactgctttttccagggtggacattctatatgaaaaggcagtcttctcctctgaggcgagctgttgaagtagcactcatctgtaaccagttattagatttttaaaaaatcatctagtagtaaaaatatctccaaactgcttctcaaagggatcaattgaatagttatttcttaatatttagaatgtaagtaagttttggatagacaagtggatagtctggtagtgatgaagccatgggcttatagtgggataggaggtactttaggcaccagagggctcaggggtggtatcctagtttcatttctattgctataataaaatgcctcaacaaagaatcaagttaagggagaaatgatttctcttagctcacaagtctaggtgcttctctgtcatttcaggagagtcacaatggcaggagcttgaagcagctcgtcatatcacatccatagtcgagagcaaagagagctcaatgcaggcatgctcacctcacagctcatttactctacccatacagtccaggatctcctaggaagtagtgccactcacaatggactgtgtcttctcacatcaattactataatcaagacaattccatgcttacagaccaatctcttccagagaatccctcattgagacttctgagtgattccaggttgtgtccatttgatggttatacataatatcacagatggattctctgagggggacacctgatctgtgaaacttaaagctgctgaaatttcgcttcaatgggagtattcttgaaagaaagaggaaacagcatctaacaacccaaaaccaggcatgagaaaccctcatttgggctgttggtcagagttgtctaagagactcccaaaacattacagattattgccaatgccctcagttgcctgacaggggtagaaattaagtctctttcggtggagacaccatgtacttcagacgtaaggcccagaggcccctaagttggaactgacctatatgtcacctccctgaggactgtctttcatggtatcagaaggagccatgcaagcttccaaagggcagcaacccgcagtcctatccaactatgaactgtaacaactaccagcatgccataatgacccaagagcaatattaacacacacacacacacacacacacacacacacacacacacatacaaacgcacacacaccccttcccaataaccaatagctctcttcttggagttcagtcctgctcaacaagagggaagccattcttggtactagaaaccaagccaattacctggggttactgaagtcctagaacttggagaagaaccagcataatgcctaactacattataaatatttgtcctcttacccacggatgaggtgtttctcattcctcagtggggacacttctctttacaacagacagagactaagtacagaaaactacaaccaatcaaaatgaagaattgtggagcccagttccaacagacatatctacaaaacactcttagcagctaaggccctggaagcattgcagaagaaggggtcccagagaaccagggaatttgctgtgagcttgagtctcctagtaatgccagaatttatagtcatgatctctcaccaaccctactggctaaacatgtgctgaacaaggataataacagtaggcattccaaagaggatggggaaaggccacaatgcctcaactctgcacaaaacactacaggcaactgaggaaaactgagcagaagacaaatagtcttccacagagaagaacacaccagttatttatccagttccaaatggtcagccctgaaaatgtatatataaataacattatacagattgagcaggttctatttagttgtgtgtataacaaaagttcatgggaagaaaaagagaccatgaaattgaaagagagcaaagaagggtgtataggattctggagggaagaaagggaaggaagaaatgatgtaattatattataatctcaaaaataaaataatctcaaaagtaaaaggaatgaggcagaggccttcagagatggatggtgggcacatgacttgccatgtgagcatgaagacctgattttaattcccagaacacatgtaacagacacacatgtgtttgtctggaatcttcaaaatgttgtgggaaaattggaggcagagacaagagactccccagaaactcgtggactcagctagtctagtgtattcagcagaaaaacatcagagacccatctcaaacaaggaaggaaaggaccaagtttctctaacttccatatatacactgtagcatgagtatgctcacctttggacagagggatggggaacacatattatatgcagagagaggttgagggagataggtagacatgctggagggcatatcaaaaaagcgagacaaactttcatttaatttaacatttaactaatatataaaaaattttcaagtctagctttcattttgcctgggggataatggacaagaaagagctgtaaaaaattagatgagagaggtaaccatgggccagacttttcagggcctcgtaagctatggaagagatatgtgctttcattttgggtgagatagtgtgccaatggaggatttgtaggacagaagatgcttgatctgcaggtttgaaatattaactgtgagtacagggaatatgggtgaaataaggcgagtgaggttgttattgttagccatgaatggaaaaaatgctatcttagaccgaggtgggcaggatgataatgatggaaacttgtcattttgagcttttaatttttaaatacttttttatttttgagataatatgattgtatcaagtccctgtttcctctcctcttgcccaactttcccatgtctcccacttattctctttaaaattcatgccctctttttctttgattgttgttacaagtgtgtgtgtgtgtgtgtgtatgagtgttcctaaacactgttacttgtatgtacatgttttcagggctgacaatttggtatcagataaccaacttggtgtgctcttccctggggaaaattatttcttccattctcatccctcctagttgcctttggttctttctttagtgttgaggcttttgtgagcttccaacctccataatcacatgtctgttcctgttgtccttgttcaggtcatgtttagtgtaacttaatgggtatagctcttttgcagctttttaaaggcagaaatgataagacatatgagctgagtatgatagatggggagtgggatgagggagaataaatgaatacagcaccacactaagtttaatgacgacagtcattgagatgaggactactgaaggaaagaagaagaggaggaggaaaaggagaagaaagatcgagtttggaactattggtatgaaatgcctaataaatatcctagagcagatatggagatggtaggggaatacatgcaccagagtccttggaagaagatttacattggatcatatcacctaaagatgacagagtaggacaccaagaacaaaatgcaggacactatcataggtccaggattctgatttaaagcaaaacaaacaaacaaaaaaaagacatagcaacgggagatggaggagaggacactgggcatgagatacatgcaaacaacaacaaaaaaatgggaaattagttttctcaacagcaagagaagaaaggttgtgggaaccagaccatgaagcactactgtgaaatgaagattataaaggatcagatttggccttatgggggtccttgatgtccaagatcagagcagcttcagatccaatacatggcttaattagaggagctatcttataattgctctagattcttggtgaaaggagaattagttatcttgtgaaaactaaggaggaaggaggaggcttgagagctctgtgaataaaaaaagctgtaacatagtaatctgatgaacaaatccacgtggaaagacaagaggacttctggataaacaaataattctcttggcacttaaggttataaatttaaaatagaagcactgtgctttgtatagtcttcccaaacatgttaaccttcccaggtgaatggaagcaaagaacaagatttaagctatggtaggaagggtgctggggctttggaaatcaatatgaaaggatgattgtattagaatggaagtaaatcagacatgtggataggtagacaagggagaaatggtggtatcaaagatcaataggatcaaagacatttttaaaatggagatgcacgaaagagtaacatagaaagatgtggtatgactgtaagttgaaattttggtaatgacttggtgttttgatggttcagttaaaagcatttgatgatgatgtattggcaatgacgaggcttaggatacactggatagtaacagtgaatggccacaaaaaatattataaagggaaaaataatttgattaagaaccacagaatgtgaaacttgaaggactcatatcttgagtttttataattaccacgaacaaaaatgaggggaaggaagggcaggaaaatctccaaagaactgtggcaaggccaggaggagctgaagaacaacagaggaaggaggtagtattatctcatggaaagtggtctcagagatgtcaagggggttagcaaatagaagacttcactctaaaagtagcactgaagaccaagaaagccaaacagtaagatgagaagtacctagtctgttggaagaaaaccagaaaagacagtgaaagaatagccatgcccccacagaatcatccaggctgatatgaggagcagaaggagcagtttgtgcccagagaagatacagaatttactaatgacagaccctggttcccaaagaacactctggatactctcagggtaattggggggggggggggaactaaggtcaggggataagcagagcctctgggagtgtagatctgtaacattctggttgctgtagcttggaccaagtagaatccttggcatcctgctccagcgttgggtacaaggaggaatgagagttatatgctcttgggaattatgtctactgattctggtgatgggatggaatggattgaagaagggctatgggaaggttttggcagaagctgcaaatatctagatctttacttccacactgtccttttgtggaaggtaaccataaggttttcagaaacttctccaattgttacagtattttctagacagaaagaaaggaaaaaaaaaaacaaacaccattatggaatggggtctttgcccaaatgtatctaggaattcctgagttggttgaaagtgtcaacaaacactgttttcatggagaacaatgccacatttacattataaaagagctggtatatcctttcctcagatacaaggctggcattccctaaatagctttggctgtctcttagggagatcacagttggaccaaactctacaacattaccatgaaatgtcacttggaaatgatatttttctttgctcaccactgaacattttgaacttgggaagctcacgctgacaacagagtttctctctcctgtaggtcaaccctggtttatttgttaagcagtatttgtgaagggcacatgcttctaacaatgactcgccagcatctttcttacattataaccaaacccataaatcactcattatttactaatttattaattcagcttccttgttttccctgcttgaaagtagtcgttttaaaaagtaaccaactgataatttttatgtggaaagaacttgatgtcttagtgacttgccctgtctctgtgttaaagtagcctgacaagaacaagctaagggaagaagcatgtgtttaggctcccagctcaagagatgaattcatcatcacagagacatcccagcagcaagagcctgagcagctggtcacagtgcatgtgtggttaaggaaagggtggtacacatgtgtggttaaggagagggtggtacacgtgtgtggttaaggagagggtggtacacatgtgtggttaaggagacggtggtacacgtgtgtggttaaggagagggtggtacacatgtgtggttaaggagagggtggtacgagtgtgtggttaaggagagggtggtacacatgtgtggttaaggagagggtggtacgcgtgtgtggttaaggagagggtggtacacatgtgtggttaaggagagggtggtacgcgtgtgtggttaaggagagggtggtacaagctgctcctcagctggctcgctccttctctgcagtccaggacacagatgcaggggatgatgtcacctaccttcagggtggctcagaagctaacctaatctagataatcccttagcttgtctgctagtggccactagatccaatcaagttttgatagccaatgtaaatgaccacacatcattttgataattgtcatagaactactaaaaactttgttattataaagtgtcgtgaaatagattcatttggtcatcttaaagtctaattagtttctctgaacgcctgggtgccttttgaggctgttaaataaaacttgttgaccttttttcccctaaatgcaatctcatatttcaaatacgtcctttataagcgtatgaaacattgattgatttgatggcatttgggtctaaaattacttcttagatgtggaagagaacaaggccttgttttcgaaagtttctgacctaatggctttcttctcaaaaagaaggcaaattcagaattagaaaggagctatagatttcattctgacctgctccagactgaatgtttagagccttcaggatgccccagataagggtttcagaataaaaccagccactgagatgaataaatctggcctggccctgctgtgcacctggcagtgcacacacagtccagctgagaaaggatgaatgcgtgcaatgaacccagccgagttagcgatggacttccatcatagaggatgtggggatggcttgctgtcttggagaagacagaaagctgggcttggggacagcaggaagcacttggaatttacagagaatgtgtttgaattgaattttggtatataattaggaattcatcacctatttgggatggaaattaaatattcatcacgtaattttgcatcgaataatacagaagatatcaggaagaggattcagaggtgggtggagaatctgaacagtagatagaggcaaaaaaaaataaggcagcctttggaacccttgagattagtaggggcccagaaagaagtgccctggagaactgggtcactacatatggaaaagatttttatattcattattcataatgaaggctcacacggaggcccttgtgtgtgtttatgagactgttaccactgtgctacagtccaaggcctggaaagatgctaactgagggccctagaacaccatctttggcaaatttggagagaatcaaaagatatttttgttttccaaatgttacagagaacattcacttttgttccttctgtgctaagagacattcgtggatcaggttgttctaatgatgggattggagcccttctcacaatgaggctgagttatctggtgggtgtttctccaaaggaagactttacacctgcttatgtgtgttcttccaactataatccactgactatgagtcttttcttaaaaaaaaatggattctctattctttggtgagtggggaccatgaaacacagtagtgcaaaagaaatcagcaaggtcatcctgtaatacaaggagaaggctgaaggaaaaacctaaggagggtttattttcaggtgagaccacttagagccgggcgtgggcattgtttggttacaggtttggtttggcccatcatcaggagaagccagggcaagaacacagagtgagatcctggagacaggaacagaagcagcggctgtgacgtagggttggggaaatgctgcttactggtttgttcttcatagcttacgcccagttgggaaatttgactagagtcgtattcctccccatagggtagccttaagttttcctgagcctcataaggtgttatgcctgagacacaggtactccgtggggtcccgtcagtcatctcagggttgagccagtagtgattctaatctctgggtgcagtctctatactctcctctaaggccacttcactgcaacagtaatgagatgaatttaagaaagaccctgagagcatctgttatgtgtgattcttataaaaatatcaagtctctggaaccacctctgggctttctgacccagtagatctacagttgaatttaggaatgtgcctgtttagttaacatcctgtgatgcttcatagtagatgggacatttcaaagaaactgacctaaaaattctggggggaaatgtctatttactcagtagtgtgaagccaggagttgccctgctgctatgggcctttctatacccttcccagttctcaaataatgacagggagactgtatttatttgtaagtttttggccttatacttaggtattatttccagctagcttgtaattcgattatcccatttatactaatctacatctttcacatggctgctccctctcctcggtttgatacaagcaacttcttccaagtccccatagtgaatctcccacctctgactctctcccagacttcctctctgtgtctggaattactaccttactattctgccttttgctataggtcataggctttttattttaaccatccagaacatgccttagtcaggaaaggcaggatagagacacggtgtacagaaatatcactccaaaattgtccaacccattaatagagccttggattctcatcagagtaaagtttagcttcttagggtcttctttgatatgcaccacagtttgagcttggttatgtcttcttgctccagatagaaatggaatagaagcgttgagctcctgttgggtgtggtatgaggaatcaaagctgaggctgcttctggcctgagtgcctttgtagtggtagcagtcaggctcagaagtcaggctcaggcttctctcttgcagctctcacttcactgtgacccagcagtgtcagcagtgggccccccagaagaaccattcctccttcccaagcctcccattctccctctgctccctccctccacagtctcaagtgagagctgtgactcggagaaagtgcttgaaccctaatcatagtacttagtgggactgtgacctcaggccattgccttgcttttccagtctccatcccctcaactctaaataaggatggcattcgtaactcgcagcatttctgtgatgaagaagcaatgtggcaggatgcagggtgctccatatgagctgctgtgttgtatctgctgttcggaccatgataaaatccgatcttctggaagttgcctattaatgatgcacttttggtgtcagagtgaggggccaaattttagattgacaacaaacaaacaaaaacaagacagacaaaacaaacaaacaaacaaacagaaacagcttttagatttttgctaaattacagtaagctctttttgtgctatggaatatgtaccaagaccctggtagggccctgaaaccacagatagcaccaaaccctacaggttccatgttcttccttatagtctactacctacatagatagaagaaagttctgtttgcacattaagtaaaataagaagtgaattctgagagaatactgtaagagactctgtaaactcatttatttgaggaattattcacttactgtgcttcgaatatggctgtatgtgctgctgaaattgcaaaatgttcaagaagagaaaactatggtgttagcttctaaataacagtggtaatatttaattgtgcaattgagctctcttcttttggaatttccttttgaaataaccaatacagatgtgcacacatagacagacaaacagaaacacacacacaaacatacacacacacacacacacacacagagggaggggagaggaggaggagggggatggagagggagacatatgctaaaactatgtttaagaatacacttagatacatgccaaaagctttctgtccgtggtagaattagagatcatttaaaactattgcttactcataatatattctatcaaacttcatgtacttctgtaataaacagaattttatttgggggttcttattaattttttaaaaatatttttgtaagtctttcggatgccatagtatgtgtgtgaaggtctgacaacagccagtagaattctgtggtcatttctcctgtagctcccaggtactgaactcatgtaatcagtcctggcagcaagcagccacatattctgagccattttccagcccaggcatcttattctacctgatggactaaaaatattttctcagaaaactgcgagctttgaatgatgtcctactctatgtcaatagagctgtaccctggctttgtgtcgttcggatgtcctcaggcttgattactagtctctaggtaccccaagaaatacttgaggggcagtaaggagacctggcacctgcaaaaacagacaccgtcccttccttccaatgccttctgtgtgtttcccacctcccccaatgttcacaagacagtagaatttttcctaaggaagtagaccttcttgagacattccatgaagggaaagaatgttttgcgtttgctttttgaagagttaatacactttcctctttccctccatttattcttcaagtgagtctagagtgatctctttccttgcgagtcttgctcagtctctcaggcgcttccacctgggagcttcggaaggttaggctgacaacttagggctgctgcttattaatcaggtgtttgctctgtgcgccattaatcacacaacccacacagctgggtcggattcattagtgtcatcttccatagcattcttctccccaccctgcttgctctctgtggcattcattaaaatgccaccatcactttggtctctggctactcgtctccctgtctctcatccccctagccatgtgctgtgcttgccctcttgggtgtgtggaaagattactaagaggttattaagcagaacatttaattacagggcctccgatggcctttttgacagatttcctttcagatccttggatcgtcctgaagtttcatctcaggatttgtgttccatgctgagccaaatggcagcccccaggggtgcagacgacctcagcgtgttactgagcatctgtgtgcagggctgtctcagtaggacagctctgttcatcagtcactccccccacccaaaccccagcttgggttatcctgttgatgacagaccttgccctctggtccccagccagctccttctcactatactcactatacagttcccacaaagacagctttaggctcagtgcacttcagtgttctgatctttaaactttctattagccactgttcagcacatatttataaagcacctattatgtgaacagttctgagtcaggacataatgtagttctggcctgtgtatctcacactgtagcagggagggcatataaaagcagaaccaaagagcagatgcgtcttcaagtgctgtgagggcacaaaactgatgcaaaatttaccagatgtggttgaccatagttcaaatagtgtggtcagagaatgctgtggtcccagccccagcttcatcagcattgtctgggactctccaacctgtccccacctactttagtcttgacttactagacactctaggagattctggggaccaggaagtctggacaacatggacttgcactgtatccctgtgatgggaaggaggaagtcatgtacagagtgaagaaagacaaatatcacaaaaggtccaaataccatgctggtccaagaaatagaaccgaagaccatagaaggctgagtaatttaaggacaagatgcaggactgtgctgcaagaagagcagctgtcttcctattaaaaagggattgagtgttgtcagccttgcttgaggggtttcttcaccttaggaaagaggaaagtaaagaagagagacaaattgcctaaggcaatgaagccaagactgcccagacatctagtgggggttcaagcaaaaaccagaagcaggtgaaagggtgacagccaggagcacagaaggaagctagaggaatctgggctctgtggcaagtgaccttgtgaacagttactactgtgcagagggaactgcaggaagaaatagctaggaggacagattttaaactcctcagctcctgtagaggaattaggattgtagcactaaacactgtgtgggggctttgcagtaccccagtctcaactgaatgctgttgaaaacatctcatctcccgtacctttcagtcatgtgtatgtcaatttggccggtcaggagttggtcctctccagttgtccagactgccttgctgacggtgcatcttcgtgcattatttgccgtgtcagttcccagataaagaggctatgtcttctacattaaaccctccaaaaatacctttaaccaagatgaagggttgccggggagcaagtcaaagaaggggaaattctgttcaagtgattcggagctaaatctgaggagttgatccagcacgaccagtgagccttgaggttttagatgatatttataatgtctgtgtaagtgtcatgaggcaggagagggtaggaactttaacaatatcttgctatggttttgttccctgcagttgggtggacagagggaaccactgatgtgcagtgggtggaggcctgggctgctgctaaccatctgcctcggcacagtaggcctaatgagagaattgcctgcacaagatcagcagtgccaatactgagatgggctactgtttgccacaaagaatggatccagtcatactgagaacatagttgagccttgtcatgacagggaacagatgaggaagcaaggtcaaatccaactgtaattctacggcttgtataagtctcatacacatcaaacatagtttgctactctcctctccagcttgcaaggcaccaggcaaggtaaggcagggatacaggtgtgaataaaagatggtgtgcaccctcatggaacttatagcccaaggatggcttttcattgatgcaaagtagtgaccagccctctggagagaatgtgtcttagaggctctgtagtatggtgggaacatggttaaaccctacgtatgcacattttaactttgatgtgatgtgaagaagagtgtggatttggaaagtgtaagaactgtctttgcatgtccattttcttctaagaggcaatcataggattacatacagaataaataaaactatgtaaaatagttgttcaaacagcacgtagcacatagttctcaatagtattttatagtgaacgctactcttctcagggagtctattcttcagaacttatatttctttatcttttttttccattttttattaggtatttagctcatttacatttccaatgctataccaaaagtcccccatacccacccacccccactcccctacccacccactccccctttttggccctggcgttaccctgtactggggcatataaagtttgcgtgtccaatgggcctctctttccagtgatggccgactaggccatcttttgatacaaatgcagctagagtcaagagctctggggtactggttagttcataatgttgttccacctatagggctgcagatccctttagctccttgggtactttctctagctcctccattgggagccctgtgatccatccattagctgactgtgagcatccacttctgtgtttgctaggccccggcatagtctcactagagacagctacatctgggtcctttcgataaaatcttgctagtgtatgcaatggtgtcagcgtttggatgctgattatggggtggatcccttctttatctttaagaagagatcaaacgatagagcctttgaaaggcaaaaacggtatttgcagagtacctaggaaatggcaatatattggtgtatactaaatcttcttgtttcagagtttagtctacagactcttaagtttgtacacagtcaccccaagtctggacctgaagttgctaggatccctcatactccccatcagtacagggaagctgagtctcctcccatggttatctcatcagcgggcttttaagaagaaaatatatgtgcttataaacagatttgagatttcatataaaatctagttcctcttgactctacttagagctcttgtccatttgtctattcaagttgcacttatccagcctctactgtatgctaggaattgttgtaaaaatttggcacaacaagcaaaatgccttatttggctaatttttgaaaactagatgagtgtttgtaatctataatctgtaacctgacatctaccttggagaagtctaccatattatttcagtaaatatacttggtatgtcccctgaagaaagaggtgaccatgaggagactcaacagagaagacgaagtatggcgcctgtgtgcaaacatagcatagtgaacttttgtgtgaaagtcactggagaggaccacaccttcaggtcactgggcagagtacaagtgggttgcaccacagcctggaaagggcccaggaaagggctgtggaggtgaagcttcagcccagggttatagaaatgcatctctaacggacaaaaggaaaatgttaagcccaggagagatggcctcatatttgcacttcagaaagagggcactctagacaaaagatcttgattgctgaaaagagacgaagttaggagtctcgatctgagcaggagatagaagtgtctaatcaaaacttagaatggagtcagtgcattgcttagactggggagtcaatagttgattgcatgttattgagattgagtcagataatgagaaattgaagatgatctcttagtaaattctggaatagaatgagcatccatagtctgagaactaaaactcaaaacgttccaaattccaaaacatttccatgtcacaagtataatttctaccctgacctcaagtgatgagtcttaactaaaatgctggtttactaaacacactgtataaaattaccttcagcccgtgtgtgtaaggtacatatgaaacctaggttttacactgagactggggtctcgtctttgaaatatctcactacgtacatgaaaatgctccagattgctaatgggttggcacaggatacatttctagtcccaagaattccagatgagaagcgctcaaacttgtggagataggaggaccaatagcagacaagggaataaaggaaatgctttagatgcatgcaaggggtgggtttctccttctccaccgtggagagtttagaaagtaaaaatggcctagaaatgcagacattagcgcaaactaagtcatttgaatggattacatcattgagacggaaggtaaagagaaaagaaggggtcactggactctgcaccttctcttacgagtcttgcagaattaaatgaactctgaaagacccataggagtgtctctttgtagggaaaattattagatcctgatggcttcagaaggtggctttctatgaagaccacctggttacttgtctttatcatagatacagccttcctttagaagacatggaaaacactgtctcagaattatcagtctaagcttagccaagggtagctttgaagattcagccacaaggaagtgatagggagaattccacttttgtgtccttgataccttttgtcttcactgtatagtgggaggctccagtggccccatggatgactggtacacttagcctctaaccattaataccactcattctctcacttactgggagggccctgtagtcctcctggctgcccctggtctcccttcctggtgatagaaatttccattattgacagggaaactgctggctaatggcacagacgaattgtaaattttgacaaccccgacaggtaaatattggctttgcacaaacaagtttctataaataacctgtctgctgaagaaactccacagatggcagcagggctgcccaagcgttcatttttcccaggatgctcggtgcaagaaagcacagctgtcagctttgctgcacttgctggagccaatgcttcattgctgtgctgcagcagactgcccctgctcaagggacatggcagacagacccaggacaggcagagatcgatcattctgtaacctcccgccagtgctctccattcctcggctctaaggggctttcttaaaaatgtcacttctttggttttatagtcaaagggaggagttgtctgacctggggatttattggcctcttttaattaaagtcgaccctattgaaaagaaaacgaggagggatgagacatagtcattgtggactgtgtgccatatggctgcattgctaaaaataggggtttcaagactctgaaaagaatgtcaggctattgtatgtggcacatggtggactccaacccagtggatgcgttggggtatgaaacccttcatgtcagagtcattccagggggaatatttgcccggtggccatgtcaccccatctggaaagctgaggggagagtggcaagccattttaggcaagttacagaagcattcttcacttctgtgttaagagctgcaaaagggaataaagttgagtgagatgtcagtgctctgagtgagcgtgctaggagactcctaatctgatggggagtaaatatgccctccattattgaggccagtctctgactgagattgtataccttccctcctcccctccctccctcccagtcattttcagcttctgattatatctttggctctttggtctagtttactttatcataagccccttctggcccttagaaagtggatagtgtctgagaaaagtgagtttagagatgtccaagataacaatcataaccagggaacatcctctaccaaggccatggaaaatcacacagtatcaatagacaccaaacattcagacaacatgggtagaaaattgagaacaaaacagtgcttgaggactggatgggaaagtgctcgtggacagtggagtaagagtggtgccacgctgagaagagaggaagacaatgctggacattggagagtggagcaagggagcatttcctcacgctctgagctcactcagctcccactcctgggcaatgggtctcagagggagagagagagggagagggaggggagagggagaggnnnnnnnnnnnnnnnnnnnnatcaatgagatcaatagtcaaggagtgcataggcttaagagcacagcacaactggagaggatcatgatcctgagcaagaaagtacacaagtagataaagattaatctgagagagagggagaggaggagggagaaggagagggagagggagggaaagagagggggagaggagagagagagagagagagagagagagagagagagagagagagagatagatactgggggaatacttgcatatagctccatgttcagaaggacaagcattagtctatggataccatgcacacaaggctgtgcccttgtgtgtcctgactattttacacagcacttggcatccagcacataacagatcaatgtgtgcagaaaggaggtgttttcagtgagttctcagggaatataacgtccatattgaagaagcaaccagagaacatctttatggataaaagtagagattcctatccaaccctaggttcaagcaatatgctcagcacacaaaatcatgaatcaacatcaactaaacatgtggtactagcaggggggctggtagtatggtgaaaggatctagggatttaaaatcaagccactttcctgataaagtttgcacaatgtgaactggtggactttggttaagtttgactctttgaatccttcattttttacaatatagacagtaataattgtattccccactttcccagatccaaacccatgctctaaatggcagagatgcaaacaaggactcagaacctgcagcaccaggttcagatctccactctgatgttcactacagagtgatttgtatctaatggtgttatctttctgagcgcaactttaaaatgaggtgagggtggtttgtggcttagtggaagggcatagccctggattaaatcccaaacacaaataagtaaatgcatgaagtggctgtaagtagtagttggtgttgtgccattctttgaacagtgcgacacataagtagttcacatatgctatgtcaggtggcactgagagcacactgcccacagtcatttccccaccacatgtgtctaactctcaagctttcttagaagcttctgggtcactttaaaatgtggaacaacatatgctatcatatcccgaaaggattatacatggcattatctaatgctgcttccctcaaagggaaccttgtactggctcctcacagagccaagaagaaagcccttgaggccccaggagagagcaaaatggatgatattaggtagaatggtagttcaagtttgttttttcttgtggttgtgaaaataaattcttaaattggagaagaaaatgactgcatggtattctgaaaacaaaagtaccatccatggttattgaataggatgtgatttgtgattgatctgtttgattgaagctagggcatgtcttatcattcaagatgagaggcaactattccaatcctttgctcattcacttaaagtgttatatatatatatatatatatatatatatatatatatatatatatatatatataatttgtgtatgtgtgtgtagtcattgtacatttagtcctaccttgggtagaaataagatcctaaattcaatcaaattggtaaaatcaatgaatgactattgctgatacacgctgttggcaacaatctgtttatgaatgaagagcaagatacagacaggaagaaagcaatctgccttgtgctaggactggtaccatagctaaggcagtggctggatgaagtgggaaaggaagactctaatttatacaaacaccaaatgttactttgagtttcttttgtatttataaatagaagagaaggtattgttgacaatctcagaacctaacagtcgaagtggttacatgataatgcatacaatggaataactgtcttagtcacctcctgccactaacataaaatagccacagtctggattgtttatacgtactagaaatgaatttctcacagttccagaggttacagagtctgagagcaaggcaacagcaagtctggtgtcaccttgagaattactttccatttccaatatgatgcctcttgctacagcctcacacagtatagggatgggagggccagtggacttgggcataccccttacattctcttgtaagggtaaaagttcccatagttacagtgcgactaatggctcccttcttaattctatcactctggatattaaattctcatattgaaatttggaggaacacaagtatgcaaagtatagttataaatttgataattttctttcatctcctttgtatgcttagcttcttctagccactgcagatgtgaccgtctttatacaggtgtccttggggagtgctgtcccttactatctttcagatgagtcagagctccttgccttcaatccacatcctgtgttgtaagttcacccagtggccagcagctttgccatcctgtctccagagacaaagaacacaccgttttgagcctttccacatgtcaatggctgtcacttataattacttcataattctattttaggctttgttgacatgctccaataaaagtgtttgtttcctccaaatagagctgcggggtcttagaagttacaagctgctacgctttgcaattgaggaggagagatttaccttctagctgtggcagagagggcagggctgcagactgagtcagactcaagggtctttgcaggttttttgttcagagtccaccaggttgtgaaccactgtgtggactctgacttaacaagtggatactttgagagactttgcctttaaaatgtgaagaaaagaaaagaacagcgttatgcatctactgatgagatgactaactagtccattggtttgtgaagtaaattgcacatcaaggcttacttcttttcatgcccaacttgtagctttcaagaaccaatcacgatgataacctcctcaggctgttgtgtcccaaggcagctgggctggagtgaacaaggaagctttgcaagaagaattcaattcctacccctgcccagctctgtggtcttagacgcattggctcaccatgttgagctcccattgggctatgtgtgaaaagggaggcatgaaaccagcttcacagagttttctggcggaacaaagaacatttggggagagtgggtagtttcttctgaatggaaagttcaagtagtccagtggaaattcctgcttgatgaaatacccgggagtggtcaccaagcggatgccgtgggcgaatctgtctgattgctgggaatgggttggacttgtctttatggtttgatcagtgctatgccagttactgagttagcactttcctaggtgagctcggaagcgaatcatttaacagctcttaacctgccaggggtcaatgttttgcaaggctatgtgctcttgtggtgttcccagtttaagaagttgaatggccttgactgatatatgctgaggatatgcatagaaagcctccaggacactgtttctcaaaagttcttatcataaagctctttcctccccctgttcacctctcagaatttctagattgctatgctccagaatggcctctgaaaaatgcaggttagagtccagcataactgctctcaggtcttgacaaactagcattgatccacccagttcaccttccagtcacaaagttactcccctcaagatagaggaacataaatattcacagtccttatgtgtggcctcagagaaacttggaacttctccattccttaaaagtctcactatagtcaatactataagctatatcaatcacttttcccagatgggctgaatgtggaactctttcctaggcctgtttgtctaaggttgtctcactagatctaacgaccatgactctgaacccttgttaagcttgggttaattgctaatttaggcagtgttcttgtttagaaagtccctccagggagcacagcatcagaactgggagatggttttcagtttgctctcacttgcccagctgctgatggggttacgaggatgccaacaacatatgccactccagattcttctcatttacagaagcttaatggtttccacacttgtgatttggtctatggccatctttagaatcaggaagtcaagccagccagtattattgggcacacatcaactctaacgacagcataggcatggcctctcttgttcctggtgtgctcctacttggagaaacagcacggcaaagagtgagacaggattttgagctgttgctgtaaggcatatgccactgtttgcatgccacgggctagccatttgtttccccaggcttcaggtcccagcagcagtaacagaagaatggaatatagctactgtgtctttcttagctgtgttctaagagtggagagacctccccaggcaaaggttttcctgcattctgaatacacaaggtgttaccagtttgcacatgatggagcaaggttgctgagatgtttcacctaccatctcatctcaacatgtccagaaaatggagcccttattttgcttgtgtgagtgaaatcaaaccagaaatataagttggaatagaggccactatgtggacattatcagcataagaaaccaagcctgcaggaaaatactttgtgcggctacttggcctccagggctagttcctggacttttgtctctggtgagtagctgagtctttggcccagtcataatatggccacggagttcaccacctgcccagggatgacaccatccacactgggggggggggggtctggctcccacatcaccgttaatcattcatcaagaaaatatcccatccacatttgcccacagatgaatctgatggagtttttgtttgcttgctcattttggtggttttgttgttgttttattgaggttccctctttccacatggttccagtttggaacttgacaacaaagggataaaacatagtctttgtctatttaggaacatcatctaagatgaaaccaactacaggagagtctcactgtcttagcccatgaatctcattagttaaaatatgttgacaaaaattcttattctgctttttgttgctataacagaatgcctaagactgagcaggaaaggatttgaggtcatcccatttctggaggctgagaagcccaaagcaggtgaccatttcttgcattactgtaaacatggtagaagccagaaggcaaaaatagcacctgagagtacacaaaaccaaaaagtatactcacaaagtaacaacctattctctaagtaactaaccgatgacaaatcactaacagccaataactaatccaggccttggagtgagaactcacgaggaaagaattaactcctctaaagcagctactccttaaagtaacctcaccaactaccaaagtcaactggatttcagcatacgctgtagaggggaataacagtatacgacacgtaaccatggttgtggtctctttaaataatttagttgactgcaaagcatataagcatatattcaaccattaaaccattaaaggttgtttttttttaatgtgaagccaaaatatgttttgggcttcttaattattgtttattagtcccataactctgcttaaaacaccacatgttatttccagtttcagtaattttcctttcttttagaaaatgaactcaaatcttttagaccatctccaacatgatctagatatcacatctctaattttctgtggtggacccaccaaccacaggtttgttttgttttctgaagcatgtttctctcttgcctttgaaagtatgcttttccttttcacattcatatgccatcgtggtctttaacatgcaatcaagttacataattacaataacaagtgtaactgtcagaacggcagcgtttgaaaacagagactcctaagtgtcacatcacagctggcagaagcagaagtgtgacactccctgaagcttggagtgtcagcctgggcatcaggcagcacagttttacagaacgaactgagcctgtttcatattaaagcaagtcagctaaattaagaagtttcctacattcaagaatgcagtgataagcacctgttatttgtgtccccccaaataaacatatttcccagagttcctcagagagcaacaggtgtgaatcttatcaactcccttcatcagcaagagcgcactatgatccggcaggacctgtgtttatctcctaaaaggatatgggagggtgaatgttttaggcattgtgcatagtgtgcatcggacaggacatcttgggcttttagcagcctggcacgaattgcttttggctgaggacacctggtagcagttttaaatcttttctataaagacacgcaatttcaattgtctgcttggcacttagtttcattccactgtttctgggttggtctggggtagttttctaagactgctgtgacagagtactggagggaggtggcttaaaatgtgtcatttcacagactagaagccaaaagtctaacatcagggagccttgcaaggccttgggcctttgaatcctgcaggggaatctttcctggcctcctgggtatttcttatgatttgttagtaacctttggcagtccttaaatgtgctggatccagggatcagaactgcacctcaaatgtgacactatttgttaaatagtcagacacccacagtgactagtactgctccctggccttaagacttcgatggaatgatgctaaagtttgtaatgcccgggcacgggtacattccctgaaggatttcaaagcttaggtcaggtaaaaaaaaagcccagataaaggaacttcagtgagaaaaagaaatctcctattgtttgcttctttctcagtcctatgctaaataagtgctgcctgcaatttattgttgattttttcatttgtcaattataaacatatgatttttttcatttgccaaagcgtagcaggtgtaatcgtcttgtcatatgttttcatttataagtaacagaaaacacacatctttcactagaaacctgcatttttgctaagtaagcagaagctaaaagtaggatagacttcagtgctaatgtaatcatgggttgacttcagtactagcctaacttagggccagcagctagcagtgtgcttccccgagttcttcccacatgcagcagatttatttccaaactgttattaacggtagtagtgtaggacatttgcataccacctcacctcatggattatagaaggagcaagaacttccacagaaacactcagttgacctgaccctcttgtctccttggaacactcagacatcaaagttacataccatcaaaggaaaaggactcagtagaccacttaggtctacacctatgtggcagatgggggttgggggttggcgtcagtctggccccaggactgcctggcagaagaatagaataaaaatgttctccaaggaaggaagaggaccagttaccaccagcactagccctgcataaacatgaaatcactgaggttcggtgaaccaggcctatctttgcaaaagcacagagctcccaagtgttagatcaactcccagacatgggctttgatttgttctcttctgtgcatcactactccatcctgtactaggtagaatggccaaccacctccgggggatgggggtaggggtgggaaagtagtttcaaggttgcagcttattagaaacctgatcttcagagcccttggttgtgtattttctaacaagatcacagtgtgaaatgcagtgtcactgagggctgaggaggaattatgggggtgctcctggctggaggatctctcactggaactgacatgtcccattaaaccatggcgtcacttgatcagggcagcagatggatgtccaggaatggtggcatggagaagtagagcctcctgaccttgtgttgggccatgtgtgtctgagaggagacagtgcttcaaggctaggcttctctgaacaagagaccttgctgggtgtcaagcactccgacactcccacccaacgtggagggaggggcaggcttcatcagctcacacctaaaacacagttaggctttggctctgagctgagttgaactcctttccattattcagttagtactgctctggcccttggctctctaaggctgttctagagtcactagagaaggatttccttttgtgggtattctagtccttgtcaagaagggaaaggaagaagggaagaaggagaaggagtgaggggaaggaaggaaggaaggacggaaggaaggaagggaggaaggaagggagggagggagggagggaggaaagaaagaaggaaggaaagaaggaaggaaggaaggaaggaaggaaagaaagaagaaaagaaagaaagaaagaaagaaagaaagaaagaaagaaagaaagaagtatcttgcctattattaacattcaagctaattggctctttttttcttatttcctaatcatcaaaagctcatattttcatttatttcaatcatttcagttatgtgcatcctaatcagaaataatcccaattttaatacctttcctaatggccagaagtaaacatctctgagcctcccctgacaagactcaaggtcccacttgccttgggggccaggtatggtgccatatgagagcagaagagtgaagtcaagggtggacagtatcaactcctgtgtccgtcctgacctgcagggcctctgaatccaagatgaagtttgtgatcctcccaaagccgcccctcagccactctcattgctgagcctcattagcgtgtgctcccaacctcaccccagcatagccacgtgactcgcctggaaggaagcctgccttttaggccctcctcggccttgaactctctcgtgctccttgtcttatttgcccaattgctttggaacctttccctcctgtcctggcccactgcagcactctgcatggcttcagggatgacctaactgagataatgaggggatgaagacaggacagacacacatacagaaaagttgggtccagcgccctgctcttgctcttattgagggcaccaactgcagccacaaagcagaaccccagcacgtttattttctatgtttgaattgaagaggtggatttattattgtacacgctgaacgaggaagctgatttagctagtgtctgtcagaagtctctgtaagactagtctcaggctgcagttatcctggtggaggaggaggaagctggggttgatagtttctacatacactgccaacatttgcactcagaactgaactctcttgagcctcaccagaaagcttggctactcccatgggtctgaggccttggggtgcttgacatggctgtgctcacgtcaagcagcacccatccacgcaggatctgcctcatctgctctgcacggtctagccttagacttgtgcttagccttaaacctctcagcttcatcgcccaaggattcttcccaacgccaacccacccaaagccactacaatcctgttagcatatcctttatccgattcatttcaaacctttccactaccaaaccctatctttaaaggaaatagaggtaactcaggaagtagtgtagatcaaaggtgagctgttgtcattctgatggaagggataaagaaaggagtcctctccttggttctctgaggaagtcctggctcacaccacccgcctctttctaacactgtgaaaaggcacaggcatgaaatcccacagatacaaccagtcaggctagaactcctagctgttcctgagctctgttctctgactcctgcttgctctgctgaaaaccccaagtctccaggttttactacctgtccagtcagttcccacagagccttcttcctctctgccagagactgttctctttgtcttttttcctctggtcctagatatctctcttatttgagcaccctaacccaaaggatttttctaccccacttgtaaagtataatatgtaatatgtaatagagattctgtagcttattaacctaggaggcttggcaggagccaccacaccaaagtactaagagaacagagtagacctagggcctttgcaaaactttacctagaaaagagcattgactttctaggagaaagtgatctgacattcctctctgggatagcctgggccaaacatgctttattgtctgcagtgattaatattaatgagcaattggacattacaagtcgccatggagacaaacctttagatatgtgtgtaagggaatttctaaagtgagctaacagaggtggaagatctctgcttcctggctgcggctgtaatgtcatcatttgtctcaagctcccatggtttttcctccgcccacctttccccacaaactgtgtgccaaaagtaactcttctttcctcaggttgcttttgcctggtattttgttactttgagaaaagtaactaacattaatggagggggggtatctttgtgaaggatcttgccacactgtagaaagttgtaaaactaagggtcctgttgcaagcctgtggtccctcttctggggaggtagacgcaggtgggtcaggagttcaagggcatcccgtgatacatactaaatctgaagtgattagctatatgaaatcctaactcaaaacacaaacaaaaagccccaaaacacacacacacacacacacacacacacacacacacacacacacacacaaaaccacaaaacaaacaaaactaaacaggaatggaggaaaagaaagtccacagaatggtgaattgtcaaatttaagtcttgaaggtggttactatacagagcagttgttccgggttctcttgtttgtttgtttgttttgttggagtcagggtttctctgtgtaaccactctggctgtcctggagctttctttgtagatgaggctggcctagaactcacagagatccacctgcctctgcctcttgagcgctagaattaaagtgggcaccaccaccgccccgccttgcttcagacttatagtctcttgtttaaagtagaagaaccagaaacacagaagtataccagcaagaagttttactagagacccgacaagtttggggtgtactgccaggtgagccagcagacaacaggagtggaagggcattcaaaggccccagctcttgtctttttctgaggtcctacagaagagggaactggtggctctctggttgagaggtttcagttacataacctgtcttctactgcaaatgaccttccttgggatgcagttgatttaatcatgtacaaccatttatgcccaggcataagcttttaatgagattctgtctaaaaactcattcaggacatgtatgctaagccagtcctgacttgatcagcccatctcccttggtgtcggggtgtgttctagaatatctttgaatacatacagagctttcacaaggggaggtaacttaatcttattgtttaaagctggtatatgtgcaggctattatggatacaggtcccaggttgcctagaggatgctaggagtgttgttagggaagtggtgtgttcactgaagtcttatgcttgctttgctcatgagcagggttggcatacagtcattcctagcctgaagcctgaagtcctgtagtctcctcaagaagcaatcagtgaatagcagatatattctatcgtcacatgttctgatgctgctccgaggcaggggttaactgagggaaaggatacctcggcatcttgatcactatcatcctgggtctctgggaagagcagggcagaattgattcttgtccttttgggatgattgagccctgataggagcagccgcctgggaagacttttctcttctcactgtctcagatgcagaagcaggcatttcctgttcgtctgctgcatcaacagccttctgtaaaccctttctgtgctagggactgagcaggagctcttggtgttaaatgggaacaccaccaagggtgtttctaagctgacccaagaggctgaagacctacagcagtcctccccttagagacatctaagataacatgtaagaacagagaaggcactggccaagccttggccctcagttcctcttctcacacacttctctccacctgccctctccagctgacagaaacagctttggtttgaggtgatggctcagtccccatgctctgtacgcatgagtgcagatcctcaggacgggcatagaaagctagccttagccatgtgtgcattcaactccagacagagctgagtagggggaaacaggccagtccctgaggcttgctggccagctttcccagctgaatggacctgactgtatcaatcagcagaggtgacaaacaatctaagaaaggcatcttacatcgacctctggcctcaaaaccgacatggacacacatgtgcctgtactaacaagtatgtggaatgcatgtagcatgttccacaaagaaacatagccatgcttcacttctcatgttaacttgtttgtctgtctacccctgccactttaagaggaagcagcagttaaccctttctggaaggctatgaattactggcttttgacttcctgataattgtgtatttcaagagtcccaactaaaggcaaatgcatttccaccttaacacaggtttgcactccatccatggagccttgctccctcttgccagttatcatccagttctgggttaagtttaatttgtatccttcttaagagaagagcagaacagtggtggaaagaataggaagtaagaaaaatgtcctactacttctgcatagtctaggactaaatcttcccccatcaagcagctcaaagacaatgggaaagctgggtgttcacatcgattcctaccactttcaaaaaggaatgcagacagaatgagccagacccaatggggcccatgctctcacccgtcagacgattctccacagtctgctaattccctgcacgctctcattaccaatagtctcttatttaacacaggaaaacaggctctgactttttcatttttttttctttctgtttgcattactggaaaaccctgagattgcaaatctgacctggttggcttgataaacttgctcattgaaggggaagaatccagtcaagtttgttttttgaaaattggtgaagtgtttctaaaaacagagcactaaaaatgatgcgcctgccatgctctggggaagggggtggctctccctggggtttgtcagtggtgtcttctctgtggactcttgaggagcactgcccctggagcacaggcactgtctcccagacttgggaaacttcctgataaatgcagctcagggaatcataggcgtaagtgattttaattcggcctaagagaaatagaccttcagaggttgggaaatttcagcttttacttgggggaattgcaccaatccagactttctattcttttcatcttaaaaagacacccccttaaattattataatatatgcacatgggataaaattcaccagatgtgtaatgtggagcaaaatatagcttttgaattattgtaacataggtctgttactgatttttttttattaacgtaagtgccccaagcctgaaagagccgccttagatttgtagacacgtggagtgtgcattgctattccccagtcaatggtagctggccctgggctggacaatcttgagcagtaagttagctcagttgtactctatggagaaagagtctgcatctgctcagcgatggcttcttcccacatctcattgctgtgagatgctcagatctcctcacagcacggttactacctaatgagcaatataatctctaaccatgactccggcccttgtgggaatgcattatttcattaggccacttgtatctcttggagcagcaaactgttcattttctcaattgctcccaaaggatgcacaaggccaatgaaactccttacttacactttgggcacaacttgatgaccaggaaagctctggcccaaatccagaggactaactcgggagcatgcctgtgaaagccaccataattgatctgagtgtcatagactttaatagttcatgtttctgtacaatgttgccagcaatgtttatattgttcttgtatatcaactcttgagagttaaaaaaaattacctgttacttgaacaatcattgtttaattcattcaacaaatatttttctaggagatgaacattctggagtggctcatgctgagcacgaagcaagagaacaaatatggtgctttgtggattgttccttgtgatgctcagagcactgatgtatcgtccattaataagtagctatagctatatattatcactttaattccaacctaaagcttcccactcagtgtcttgatatctatccacctactcaggcctaaagaggaagaaggagtgtctccaggagtagctccaagtgcttaagggttatggtaacaccaaagcttctcttccttcacacaggaaggggtgcaaagctaagccctggaggtaggactggcctagtggtgtgatcagcctcagcacactggaatgaagtgaacctttaggagtcctcacccgagtctggagtttcccaggaagacagtaggaaagttttaatgtctcctgtctctcccgctcctaagaatccactgcgtacttgtgtatacatggcctttcactcagtcactgactagagcaaataatttgtaaatggcagctgcctacagctgccatgcttatgctgttctcagtcacctctactccatctgtcacaaggttcattgtgaacattactgtgtgtgcatgagtttgtgcatgctttgaagcatttgggaaagttcctttctccaacccatctggtagagaagggctttccctgtgggactgtctgatttccagggccctctccaagcatagtccagaggtgggatgactaactgcattttaagcaatagttaatactttcagtctggactgtgaaaggcctggacagaagactgcctggcaggctgcttggtggtgactggtcatcactcggtagcagtagatcaacagggccaggcatagatagcaactctcactgttggtggcagagtgttgctgcctctggcttttttttttttttgtcagtgctttctggatggctgtaagagaagatggcagattgtaccattcttatcagatgtgtacctttccagctacccagtgccatcctcacgttgccaatgttactgtaattgccttctgcacctggtggtgcctgttgacttaaaaccttattgattgggtggggaaggacaaaccttgctgtgaaagccctgacactgtgaagacaaggaaatggggggagattcagggcttactgtgatgctgttctggggtagcagcgaagatttttttaggcagccagcttccagtttctgggatagtgggaatttgaatttatgagttccacagttagccctattgcttcatttcactccaagacactcatcacattaataagtgcccaagcagtgaaattttgagatgttatgtttcctcggttaacttctgtgatccacagagacttactaacgcctaaggtcaagtttgggtttctaaataagcagagattaactagcctgggctaaatatcgattaaatgaaagtctagcttactggtacagtgtaagatgagtcacctattgtatgacactaaattccaaaaatctctgagtctacttttagttcttaatggcaggtcttggaattaattaattccttttggtatataaatggcacttaagctctgtcagttatccatatgttagcaggaacaaacatcttcaagtctgatnnnnnnnnnnnnnnnnnnnntctcttttctttctatacacacacacacacacacacacacacacacacacacacacacacacatgcacacacgagtaagacaaggcaaagagtaaaatagtttggtactatctccccaagtaggaggacttggtgtggtgaaagcagtggagagtcccccatcctgagctaccttatttaatagaagcttgcctactagtctaatttttctcaagagaaggtcactgtagttcactcattgacatcagtacgagatttggcctagaaagactagaaaagttttgctagcagtaacatgaacaaggttccttacacattacattccatgaaacatggtcatgctactgttaataggtataatgtatcaaagtgttctgcggcccagcacctctgacatatatgtgttaagctagaatgcagagcttggtagtttgtgagtctctagtactcccgccatggtcccttgctcactaagcctactgggctccttttgagagatgactgcatcgtgactgaggggctccaccttctgctctcctgctcgcttacttcctgctttgccctcagtctcccctcatctgtgctgcaggaattaaggacaggacctaagttttgcattaattgagtgaactgagctctccagcatatgagaagcattgctacagcacagcagtgggtgggctgccagtggaggaaccctgcttgcttgtggtgtttgaatcctaagtctgtttatcttattacatgatgctaagcatctacccaccgctcctatataatctacactgatcataggtaagtacttattctttttttttcttttccattttttattaggtatttagctcatttacatttccaatgctaacccaaaaagtcccccatagccacccacccccacccccctgcccacccactccccctttttggccctggtgttcccctgtactggggcatataaagtttgcaagtccaatgggcctctctttccagtgatggccaactaggccatcttttgatacatatgcagctagagtcaagagctccagggtactggttagttcataatgttgttccacctagaagggttgcagatcccttttagctccttgggtactttcttctagctcctccattgggagccctgtgatccatcccattagctgactgtgagcatccacttctggtgtttgctaggccccggcatagtctcacaagagacagctacatctgggtcctttcgataaaatcttgctagtgtatacaatggtgtcagcgtttggatgctgattatggggtggatccctggatatggcagtctctacatggtccatcctttcatctcagctccaaactttgtctctgtgactccttccaagggtgttttgttcccacttctaaggaggggcatagtgtctacacttcagtcttcatttttcttgagtttcatgtgtttaggaaattgtatcttatatcttgggtatcctaggtttggggctaatatccacttatcagtgagtacatattgtgcctttgtgaatgtgttacctcactcaggatgatgccctccaggtccatccatttggctaggaatttcataaattcattctttttaatagctgagtagtactccattgtgtagatgtaccacattttctgtatccattcctctgttgaggggcatctgggttctttccagcttctggctattataaatagggctgctatgaacacagtggagcatgtgtctttcttaccagttggggcatcttctggatatatgcccaggagaggtattgctggatcctccggtagtactatgtccaattttctgaggaatcgccagactgatttccagagtggttgtacaagcctgcaatcccaccaacaatggaggagcattcctctttctccacatccaaaccagcatctgctgtcacctgaatttttgatcttagccattctgactgttgtgaggtggaatctcagggttgttttgatttgcatttccctgatgattaaggatgttgaacattttttcaggtgcttctctgccattcggtattcttcaggtgagaattctttgttcagctctgagccccattttttaatggggttatttgattttctgaagtccaccttcttgagttctttatatatgttggatattagtcccctatctgatttaggataggtaaagatcctttcccaatctgttggtggtctttttgtcttattgacagtgtcttttgccttgaagaaactttggagtttcattaggtcccatttgtcaattctcgatcttacagcacaagccattgctgttctgttcaggaatttttcccctgtgcccatatcttcaaggcttttccccactttctcctctataagtttcagtgtctctggttttatgtgaagttccttgatccacttagatttgaccttagtacaaggagataagtatggatcgattcgcattcttctacatgataacaaccagttgtgccagcaccaattgttgaaaatgctgtctttcttccactggatggtttagctcccttgtcgaagatcaagtgaccataggtgtgtgggttcatttctaggtcttcaattctattccattggtctacttgtctgtctctataccagtaccatgcagtttttatcacaattgttctgtagtaaagctttaggtcaggcatggtgattccaccagaggttcttttatccttgagaagagtttttgctatccttggttttttgttattccagatgaatttgcaaattgctccttctaattcattgaagaattgagttggaattttgatggggattgcattgaatctgtagattgcttttggcaagatagtcatttttacaatgttgatcctgccaatccatgagcatgggagatctttccattttctgagatattctttaatttctttcttcagagacttgaagtttttatcatacagatctttcacttccttagttagagtcacgccgagatattttatattatttgtgactattgagaagggtgttgtttccctaatttctttctcagcctgtttattctttgtgtagagaaaggccattgacttgtttgagttaattttatatccagctacttcaccgaagctgtttatcaggtttaggagttctctggtggaatttttagggtcacttatatatactatcatatcatctgcaaaaagtgatattttgacttcctcttttccaatttgtatccccttgatctccttttgttgtcgaattgctctaggtaatacttcaagtactatgttgaaaaggtagggagaaagtgggcagccttgtctagtccctgattttagtgggattgcttccagcttctctccatttactttgatgttggctactggtttgctgtagattgcttttatcatgtttaggtatgggccttgaattcctgatctttccaaaacttttatcatgaatgggtgttggatcttgtcaaatgctttttctgcatctaacgagatgatcatgtggtttttgtctttgagtttgtttatataatggattacattgatggattttcgtatattaaaccatccctgcatccctggaataaaacctacttggtcaggatggatgattgctttaatgtgttcttggattcggttagcgagaattttattaaggatttttgcatcgatattcataagagaaattggtctgaagttctctatctttgttggatctttctgtggtttaggtatcagagtaatagtggcttcataaaatgagttgggtagaggaccttctacttctatcttgtgaaaaagtttgtgcagaactggaattagatcttctttgaaggtctgatagaactctgcactaaacctgttggtcctgggctttttttggctgggagactattaataattgcgtctatttctttaggggatatgggactgtttagaaggtcaacttgatcctaattcaactttggtacctggtatctgtccagaaatttgtccatttcgtccaggttttccagttttgttgagtatagccttttgtagaaggaactgatggtgttttggatttcttcaggatctgttgttatgtctcccttttcatttctgattttgttaattaggattttgtccctgtgccctctagtgagtctagctaagggtttatctatcttgttgatttttctcaaagaaccaactcctcgtttggttaattctttgaatagttcttcttgtttccacttggttgatttcacccctgagtttgattatttcctgccgtctactcctcttgggtgaatttgcttcctttttttctagagcttttagatgtgttgtcaagctgctagtatgtgctctctcccgtttcttcttggaggcactcagagctatgagtttccctcttagaaatgctttcattgtgtcccaaaggtttgggtacattgtggcttcattttcattaaactctaaaaagtctttaatttctttctttattccttccttgaccaaggtatcattgagaagagtgttgttcaatttccacgtgaatgttggctttccattatttatgttgttattgaagatcagtcttaggccatggtggtctgatagaatacgtgggacaatttcaatatttttgtatctgttgaggcctgttttgtgaccaattatatggtcaattttggagaaggtcccgtgaggtgctgagaagaaggtatatccttttgttttaggataaaatgttctgtagatatctgtcaggtacatttgtttcataacttctggtagtttcactgtgtccctgtttagtttctgtttccacgatctgtccattgatgaaagtggtgtgttgaagtctcccactattattgtgtgaggagcaatgtgtgctttgagctttactaaagtgtctttaatgaatgtggctgcccttgcatttggagcgtagatattcagaattgagagttcctcttggaggattttacctttgatgagtatgaagtgtccctccttgtcttttttgataactttgggttggaagtcgattttatccaatattagaatggctactccagcctgtttcttcagaccatttgcttggaaaattgttttccagcctttcactctgaggtagtgtctgtctttttccctgagatgggtttcctgtaagcagcagaatgttgggtcctgtttgtgtagccagtcctgttagtctatgtctttttattggggaattgagtccattaatattaagagatattaaggaaaagtaattgttgcttcctattatttttgttgttagagttggcattctgttcttgtggctgtcttcttttcggtttgttgagggattactttcttgtttgttctagggcgtgatttctgtccttgtattgcttctcttctgttattatcctttgaagggctggattcgtggaaagatattatgtgaatttggttttgtcgtggaatactttggtttctccatctatggtaattgagagtttggccgggtatagtagcctgggctggcatttgtgttctcttagtgtctgtataacatctgtccaggctcttctggctttcatagtctctggtgaaaagtttggtgtaattctgataggccttcctttatatgttacttgacctttctcccttactgcttttaatattctctctttatttagtgcatttgttgttctgattattatgtgtcgggaggaatttcttttctggtccagtctatttggagttctgtaggcttcttgtatgttcatgggcatctctttctttatgtttgggaagttttctttaattattttgttgaagatattagctggccctttaagttgaaaatcttcattctcatcaattcctattatctgtaggtttggtcttctcattgtgtcctggatttcctggatgctttgagttaggatctttttgcattttccattttctttgattgttgtgccgatgttctctatggaatcttctgcacctgagattctctcttctatttcttgtattctgttgctgatgctcgcatctatggttccagatctctttcctagggtttctatctccagcgttgcctcgctttgggttttctttattgtgtctacttccctttttagttctagtatggttttgttcatttccatcacctgtttggatgtgttttcctgtttttctttaaggacttctacctgtttggttgtgttttcctgtttttctttaagggcctgtaactctttagcagtgctctcctgtaattctttaagtgacttatggaagtccttcttgatgtcctctatcatcatcatgagaaatgtttttaaatctgggtctagattttcggttgtgttggggtgcccaggactatgtggggtgggagtgctgcattctgatgatggtgtgtggtcttgatttctgttagtaggattcttacgtttgcctttcgccatctggtaatctctgaacctagctgttatagttgtctctgttaagagcttgtttttcaggtgactctgttagcctctataagcagacctgggagggtagctctctccttagtttcagtgggcagagtattctctgcaggcaagctctcttcttgcaggcaaggtatctggtgtttgaaccggactcctggcaggagttgtgttccactcaccagaggtcttaggatcccgtggggaatcctgtgtgggcccttgcgggtgtcgggcgcctccgctggcaaggtacctcggggctcgagtggagcggaaggggcttgtgccccaggtcaggcccgggtagtccgcttccctatttactgcagtctcaggttccgcgtgattggattggggcagatgctgtgttccactcaccagaggtcttaggatcccgtggggaatcctgtgtgggcccttgcgggtgtcaggcgagtccgctggcaacgtaccctggggctcgagtggagcagaaggggcttgtgccccaggtcaggcccgggtagtccgcttccctatttaccacagtctcaggttccgagcaattggattggggcaggggctgtgtcccactcaccagaggtcttaggatcccgtggggaatcctgtgtgggcccttgcgggtgtcgggtcgggcgcctccgctggcaaggtacctcggggctggagtggagcggaaggggcttgtagtaagtacttattcttaaacttaaaataagttatgggattttattttaactttaacatatatggaattaaggcacaattattagcaaaactggcatcacacactaaattacaagactgttgcattgtgaattaaaacacaaatctacattatagacacaaaaatattaattataaaagtcaaataagaaatttagcatttacttgagagcaatgaagggcaggccttggcttttggcagtgtgtgggtagactggcagccctagtgtcaggcattggagactggcacaaggatgtcctggagtatccagaaagcagcatgtagctgccatcctagtctgtggaggagaaggggaaagactcagcaatccaaaagctacaattctgagcaagttctacatgtaagaatgataaaactaatcacagtgtgagtgggtcaccttccctgtggctctcggcatcaatacagaaggcctagtcaaccctagtgctagccctgacactcagtacaaatgcacagctgggctcttgagcaatgggagtccaggaaggcctgctacttagccttgtctctaggtgtgaccttgaacaagtcacacagactcagtccagttctgcatttcattcgtcctgaccacaggggcttgtgtagaagtgggagcagagtctgcatctcgagtctgggcttcttctctcccttcactccttttctttgggcagctggaatctcccttatgtaacatgctcaggaaaaggaggacaagaaggtaaaaatattaccacagagctgggttctggggatggaagaatgaagatggaggacccaaagggaagtagagaggaatggggcaaacatacagagagatgggtcaccctggcccctggtattcatctatgcttgatctttctgctcactgctgggaccaccctaagaccaagaaccttcatggagggtctggagtggagacacatccatcatcattgctcagtgtttaatattccagaaactgtcattaaaaacatttcacacaccattgttggaaagaaattaccagtgggtgatttgactgaggttatcaccaggctggttctggatgcttaaggtctttgtgccttttgctttaaaaaaaaaaatgcttgttagaaaattcattttccagacaatcttagtaatcaccttcgcaagggtcagagggaaagaaaagagacaaagatcagccactgagctttcaaaccctatactggggtgcaggagggttgaaatcaggaggcgataaccttgggaccaaaaggaggggctgagaagatgagctttccagtgcgtttctgccatttcatgctgagaagagcctcctttcataaattaaggctttatcttttgtgcagcagctagcctcggaggcgggggacaggcagagggtggtggatctgaggccgagctatgtatagattgcagggctttggtttcccagactctggaacccttcaagcactccgagagtcacgaagaaatgatcgctctgtttgttccttgaagtataaaaatggttttatttttagacatgactgtgtggtttttcttttttttttttttttctttctttaatctactgacagctgtcttcagaggcagccaggggaagcagaattctgtgaccaggggtgggcacaggcaggaactgcctaagatgccaagctgcctcaccctcagcacccttcacatttggggtttgatcctcctgggttggggagctgccttgagcatcttgtgatgtggaatgggatttcttacctctgcccactagatgctagtagcaccccagctcaagctaggaggaccacatggtgctgagtgttctccaggacagaattggccctaggtgaaagcatggctctaacttcagttcttcagtcattgatgttctgtcttcagcacagtgggaaagcattttcctctccttccacccccatccagagaacacgcgtagtttgtgccgatctgtcaggaaatgtttgcattgtatttaccaaatgtattcccgttaagtgaaacttggctaaatatgttgcttcagctggagaaacacattttatgttggctttgtttgtgtgtgtgttccaaggcaggccccgtaggccatgttcatcctggagacgttacggttctagttgtgggatttgttgttgttgttgttaatttattccttgatgatttatctgtggatgtagtatatccagtcatggataccctgcccctccacacaaactcttctcctatcctcccttccactcccttttcaataggtcctcagtttcatgtctttttgattcgtttattttcatttgttttgttttgttttctttgactgtctatgttctgtgacctactgggtttaactaggccacttaagtgggcaaggatgttaagacatccatccatatttggattccagtctgctgttttggatactctcctccctaatgtttggactcctagaaggagaacagagagacacgatctgctggtagcaggacttaggtcaaagcatggccatattcccttgtaacataaggatgtgctgcctagtgcggaacccccaggcttcagatatgcaagcccactccccactgcccttaagtgtatgccaaagaagagtgactattttcttaggaaaggcaaactaagctatgaaatcaaggccaggattgaaatctaaatttagatttttggaagtagaatctggcaggaatcagaaatatttagaagagcaatattcctcacacacagctccagggatgacagcatgactccttgtttagagtatgccttcctccctgggatgcaaggctcttggacctgcttcatatgcccatcgcccacttatcctgagcacctgattcttctcctcagagccagggagatactgtgggccatcacttttagttcccagacataccaaactctttctttcctttatttggagagtcccactcttctcacacacccgaaaaattcctacttactcttagcctgattcacacatctttttgatgctgcttctgggtctagtgctgatgctatccaaggaaataatggaattgctctttgctgctcttctatgagtttcgagtctaggtgcagtttcctagatattctctgcattgaggactagagtggggcatgatcccagtcttacagaagtaacttacatttgccattctagaaaggacttttggtgattttcagagacctctgtccaggcccaacctggtatatgaggctctctgcttctgacaccaacctgcaggttgtgtttgtcatgatcctttattgcgagtttcccagtggcatcttggaaatactttccctaagctttagctgtgtttcctcctttccttcactctcctctataaagacatgggtggcccactttcagaaagaatttcactcattgctaaattagcaaattcattagttctgtaaaggcatcttctatcctataaattttaatctattcaaattaattaattaatgaatgcatcttgttactctttaaataatgagcatctcagagatgtagagaaattacagttttatcacaaagagctcacagttgcttcatttaacattccttctccacaaaccatgttctaggggattctgcactgggaactgaccaagccattaagggagtgtaagaggagagacagtactggacaggacataggtagataacaacagtactggacaggacataggtagatgacaacaagcaacttaagggaggatccatggttaaggtgaatttacctataaaataaagacaataattcttttctttattttattttttccttctctataaactcattttgaagatgatttcctaattgtcagaggcaaaagagcctcctgtccaagaataaaactaattataatgacaaattgtccaaaatgagaaaaataatctgtaggctgaaattttccccaaagcaatgaaataaataaaatgtctttttaaatacctggtggaggaggctgataaaagaaatttaactgtctgttggttttttaaatcaataatatgtgaatttaaaatgaaaaaatatagaaagatatttaaggatataatataaaataacagaatttcatgagctttgtgaatttgcaggttgatggaaaatatattcatagtaagatagctaatgaatctttagatttgctttgaaaaacagcatctctcacacagcccccttcccctctgtattaaattgcttcaggtgagatggctggactcattattagttttgtactttgatttttcctaaaatttccctcattctcataagtgaattagccaaaataagaagataacaaatatttagaatttcgatttttggggggaagttccacaataaagaaaagagttgtggacccaggtaatcaggcaagttgagagaggactactactgtaagtgtactttacctgtcactatgatccattatgacagacctcaaaaatgccctggatatagtccattctaatgggaccttctctgacccaatccttaaccacaggctaccatgcttctcaaggagccggcaagttcccagtcttgtgacacttcctccataggtcaccttctttctgcatctccacatggcagaagcagttgcaagctctcgagggcctcttctataatagcactaaccccattctaattgccttccaaaaaccccacctctccacattactgcattgggattagatttcaacatattatttagcaaggaaagcaacgttcaggccatagtagatctcgacactgatggacttaatatgctcacagaagcctgggagatttataaaacatagagacactgaaagaagagtcaagaaagagggcattctgtgagaccaaagtggtcagacagcaggaaattaagtgggcaattgagaaaaacatggacaattccattattaccgctctgaaaaataatttagtataaatgctttatgccaagattttaaacagataaaactatagtcatctattgagattcattaaaatctgtataaacatgcatatacatatatacacacacatatatgtgtgtgtatatatatatgaatctcattatgtacatatataaattaatgtattcaatgagggatgatatcttctaacataactagaaaccatgttctggctaaattttaaagaccttattgtttggcacattgtagcagttcttttgaatgttcagaaatcatcaaaatgagaaacattaaaccctttgggactcctacattagacgtgtctccccattggtagtgccaggtgatggcctacactggccagtaatcccatatgcaatcaacccaaatatgactcggaaatgaaaagtaacacatttagcttcattgagttctttatttaacaaccacaaaaataaactgcagcaggtcccagtcccaataggctgacctttgagtgacttggccaaagagcatattagccaaggcagaaaaggcaggagctgggtgttactggccaatctagaggaataaaatttaggtctggcccttgaagtagaaagctcttaacatcccaaaatagaacattcaggggaagagccaatgcatacattttaggactgttgatagccataggatggaatattaacaccctaccagagttcccaatagtcaagcatcagctgtaacgatgcacagaatttaaggcattttgaacatccacgggtgaattagtggcatgggcttagacttcatggacagaggctatctatgatcagacaggctgttcggcaatgggttttaagatggactacagctctgatgagagctgttgttgcagaaacattctttctgcccacagcatccatcagtgagtagagatgtgaactgcagctccatgagcacttagcatcagagcttcctacagagctcgggcactgtctttatagcactacactataaacaggagcaatttggtgtccaatttaccagccctctctttgcttggcatacgatggacagtgtatggttctcacaatccagaaatgttgatgccatcattccactttacagaagaaactgagccatcaggtggcagagccaccctgcatgaccccagtgtatacatgttccctctactgcttccatttgagacaacctgagcttgaatttttgttcacgagacactggctgagtaaggtatctcatctgtctttcagtatgcaagcacaatggagatcaagactggtgtgtgctgaatgctgtggggcctgtagttggaggggatatcactaactagccaatgccaaagaatacagagtgatatccaacaggatgcatttcacactctgttttttccattttccaactaaggtgcccttttgcttgttggcatattgagctgttagaaggaaaattgctaagtttgtgcaagttaccattattgtgaatggtaagtccaaactcaagcattctgttagccggggtgttggctgactggaagaatggcgacatgtttgctcactgctgtagattagctctcttaataaaggcaaaccagaggaaaatagttcccttcatctcttaaagtatgtctactttgtttggtgggagctagcaattttatagacctacctacattattttctacgattcaagtactttgggagagcaaacggtgcaccctgctgtatacatcatgtgctttgaaatacattcctttttgaggaactcaaatttagcaaaagcttgaaagttttgaatgtatcaattgggagagcatggaatggctgatatccagatgtaaaaaccctcaggcgtagctatgggtctcatactcatgtcatcccaaagatatagtctattttgccctgtgctggctaggttgtagagggactgagcctagctatctatagccttgtgcacacctgagtgtcctctgagcacctcattttcgtgaacccatattttcatctataaaaccgagaaaataaaactctatccttttattcctaagaggtgtagggaagcaaagttcaataggtctgatattgccaagaaatgacttacagagtgtgacatttaatcttcacaggaaatcacagtatttaaagaacaaactgactctcaggtaaagagtgagctactggttcatcttagcttgtcacaagtccactcagcccctccttttattttgtattgtttccctttctaaatgatgaggactaattcttatgttttggcaatggttctgttgctgggtagacttccaacactgcctcatgattcattgtctgcatactgtagtgagaattttgatttctttaaaaaacacagaaatcttataagaatacatttttgttttaatcccgggtgtgggatatgcggctgcttcagattgtcttacagaagctgactatgatttgcctcatgctctagcaggggcatgattttgccagctacagatagcttgtgcaagtgtagaacatttggaatctggggtcttttgagcatgtagataaatgctggggccctgaggggatgttggtgggttgttggttgcttggtgttggttgcagtttggtaagtagtcatgtgcaaacaagaaacaacaagaagaaataagatatcttcacagcaaagatcaaacttgcccccaaggacctcgatgtccctaatcagcaggaagtagtagtttctcaatatagtaatcccctttcccctctatcctttttttctctcctatctgatgtttggggatggaaagagtgggaaaagtgggtggagaagggtaaaaagaacacacaacatagcaaaggtctgtctacagcatatattccattttagtttatatttgctgtggttgataaacattcatgctctacttagctcacttctgccacaaagaattccacaaccgacatcctcatttgtgacctttgaagatctatatggaattacttcttagatttgcccaggagttagatccatgggtcatgtgatatatgcaaatttcatttcaggttggcttttattctggaagccatatatgagaggtcccatatccttacctttccaccattaaatgaaatacgtcttggtcattctgatatctgaaagtggcatttaattattttagtttccattcttttgatggctagttgggactgcatcttttcactccttttttaatctaatgttcctttctgaaaatgagtgttttgtgtcctttatctactttacattcttagtagtcttagtgtaagtcccttgttagcttcaaatgctacaataattaactctcaatttgtaattaaataacttatcaattacatcttctttttgccaaatatacttgctatgtcaagcaggcaagtctggcattcttatatttagtggttagtaactctggaattaattttttggaaatagtttctactccaaataaggactttggatctttattataaatgaggaaattattatttcatcctgctcaatcagaaacatgacttaaaactcagtaattaactcttcacaacttagatcatgatattgacaacattttaaaagcaatcaggtatgggggagggtataggggactttctgagaggaaactaggaaaggagatagcatttgaaatgtaaatgaagaaaatttctaaaaaaaataaaaaataaaataaaatattttctgagtcttactcaaagttctctcaaaaaattttcccatagcctctcattcaattccactgaactttcctctctgcccctaaagtcttacacagtgtcttaaattgcactgcaaccaagccagttgaaattatagctttggctttcattaagctaattactatttgtacccaaatggagccattttgctcaagtagcatgaatatccactctctagagtgtttctgctttgtccaggaaaggccaggaaagtacaaagatagtgtatgtgtgccatatctccttaggtagaaggcattgggcagtgtttctgtaagttcttagtgctcttcaaagttatgagaggaattggggaggctgggggaccagccggaggctcacataagcccctccctgaaatttgtccagacaaatgctacctttattggctttgtatattggcaggtactatgcacagtctatgtgaggagatgtcctactgtccctcgggaggatggagaggtggggtagggttgagaagtactgtatcagagaactaagctacttaatagaacacccacccacccacacacacacacacacacacacacacacacatctctgcctagtgctttactatagaacagttaaatttataaaaatctcacaagacaggtttattttaacagttgtggccaaatcggcttattattaaaattatatagttcagactccattctagcagaatgctgaaggctagccatcaggaccatggtggaagatgatcctctaattcctctgcttgtgtgaagatactatacctagtagtgactgcaaaggaaaatgtgaaaaaaaacttgagtagcatgggtctcatgggaagaagaacacccgtttatcgaccagccgttcaagtgcagccccgtgccaggtgcctcatttcattgcatccttagagcttcccagagaaggcttgtcagaatgagggagtggagcctcatcagacgaaggggagaaatttcaccgtgttccaccccctgtacctccagcttcaacaccattgctatttcaactgctggatcatgattctgcgtaagccttatataaactcgtctcctgagaactttcctgaagcgcttgcagtttatgaaggaaaccctttgtaagcactttaggccctcactgggcatctatctgcttgatgccttcatcccttccagccacacagtcctcacctcctgcctcatcacctgtcacccacagctacatccatccttcttatctcccaggtcacttgccatgactcagctagcagcatcctttcggctttgatttcttgagttgacaacacaggccagtgctattttttaacttgtctcagacaggaagattgggaaatggccctgcagccttctgttttgctttgctgttgctgctcggccccctctttccattcatgaattctttttgtccttctagttggcgttgtctttgttttaactcttcagctagatcccagcaaggtctgaagtcattcttggctcttcctgtcttaaatgagtaagcatattacaatgcagggctgagaaggtttctttcacctatgcaaagatgatggtcagcatcctgagccaaacacagcagccacctaaacaggaactgggttggtggtaagaaactgctctattaaataaaatctgactccttttcactgcttgaactaaaactgtcttgtattttatgccaggaggcagtttactcaaatgtttctgatcattctaaaacaatgcaatacaaatgtgcattcctttagtgccttctagtgtctgcagcattttatatgcattgtcaatttcaccttacaactctagggtagatttttttatcatttgtatcccacaaaaccagattcagatgcaaaaagtaaaaattttttaaaagccccacatttataatctagtactggttctgaaaaccagtgtgtttgggagcttggacagattcacacaggacaagcacgcgcaagtaagctgttttgccggtgtgagcggggctggattcctgggatgaatgcggaagggttgcgccctcctctgtatgaaccgatttccctccgatcctctcctgcagaagaacttctggtccccagcttcaccgacctgcttctctttgatccctgggagctcccgatggaggaggagcatgcacgttctagttgagagaggattgcaggttttcaggttgtttgtagagctcattattaatccttgcctaactaatggtgttttcaagctctgaccagacttttgagctgccaagttctatgattaaaggctgcgaaggatccttgtcagctgcttctgatagagaggtatctcgctacagtcccatgattcattgccatcacaagcgagccaatgagcagacgactgcacttctcataagctggagcatcaggctcattgtcggcttatctgtacgttactcaaagtctcttcttgttgcattctttgctaattcacaaagtgctccaaaactttcctcctgggtagggagggtagtacacatgtttgggctcttttgtttttggtagtttgtatgtgctctgttttttatctagttcatttgacaagacaagtcttcttgtcatgaaggtaacaatgacacccatgcactttgtctctcactgtgttctctgctcacaaattgggcaaactctccaaattaaatgtggtcttgttgttccaacaatacaaacattctgcaattttcacgtgtaagttttgacacctttcccacaagccctgtttaagttttcccaaaataaagtacacattttactctcccgagtacatatcttattggcatgcctctcctctgatgcagcagctgcctttgaatcaaaggtcgtccagtgcatgcatagggtgttattctgtcctatgatgtcttactaagtgtttgtgtatcctaggttcccttagtggtttcaggctgatgaaggaaataaatgattcaatagcagagaatcaaaccttgagttctatgatgtattttctatcctgtcccttactcaagcactttagtcctcttccagagctgtatctcttctttgtagtgtgctaagtgtttcagagacaaactttgaatttgagatacttccccagcttaattaaatatatataaaatgaactctatgaagtgatagttgttataggccataaatagaacaaaggcaaaaatattccctaataattacgaaccatatactctatacaggaaataattttgcactttccctcttgtcatcaatttaattcttcactagtatttgatgtagataccacctcagtcgttacgaaggttcagaagcttgaagttgctcaagaccttgtcttagttagggtttcattgctgtgaagagacaccacgaccaaggcaactcatataaaggtaaacatttaattggggctagcttacagtttcaggggttcaatctattatcatcataatggaaacatggctgcagaaagatagacatgatactggaggagccaagagttctgtctacatcttgatccgaagcctgccaggagaagactgtcttccataggcagctaggaggaaggtcacttccacactaggtggaactcgagcccaaagcccacctacacagtgacatacatccttcaacaagcccatgccttttcaacaagaccatacctcctaatagtgccacttcccatgggccaggcatattcaaaccatagactttgtttttaaaagcatgctgtttctactgcatatcactgacaaggtctcaggagagagataagaaataaagcaggaaagagtgtgaccatttagttactgtcagcatctcactctcctcctttcacttcctctttcttcctgcccatcatagattagcatcctgtacaacatccattagaattatccctgaacagctctgactataagggatgttctaggaatttccaattaaatctatttggatgtggctccatgaccatctctgcacaactcctggtggctttctaagcatgaacatttcctctgaagacatagagaggagagagctctcctgttacaattcaagacctctcatcctttttaccaagctagtaacaaactctttggtggctctgctccttgaagatgattattatagctccaatacatctattcagtatcatgaaagttcatggttgtactcacagagtgacccacatttcatcagtctcacaatttaacactctaactaaagccagcaagcttcagcacattggaaaatgactatgtctaaaacagcttggatatcaatatttgtcatacattcttcctcggtgtaacatctaaagcaatactcatttagctgactcgcattctctgggaggtgtttacccagcagtcatcattcatgtttgttcatgaggtgttggggtgatgagccaagcagcttgtattctcagctgggcctggagcctgctaagtttggcattgattaatgatgtgcggagagcaagcagtatgcagagccaccttagaaacccacttagccaaagacaaatagctgaaagttggctgagaagtaagggggagtggctttcacaacagaagggtcattcagagacatcagtatgacttctggctatctaactagagaagggcctagcccgagattgaccgtgtttgggggtctagatgtatggtagatactcaagatagttctctgacatgctattgatggatgggtgctcactgactaatgacacggctatcttctaagatacccatggtaagctgaaaatatcacaggtcaaaagtaaatttagttgagcatagtggtatagacctgtaatcctagctattcaggagaaggtgttacttaagcctagaatttgagggaatccaggacaacatagtgaggccccattttaaaaacaacaacagtaaatgcacttcatttatacatatacatacatacatacatacatacatacatacatacatacatatatgttatacaaatatcttatcttgctggcataatgccctgtttagtatctcacagccccacaattgtttggcagtgttggcagattctcactacccagtatcaggacaaggtgctatgccacacatcatgatctaggaagagatcaaaattaaggggcagcttctacttgagattcttggaaagatcttatgctacaatgggaaggctgttttcatgtggtcttgttgtgctgacagcgccacctgcacttctttctcatttcattttcctacgtggcaggttgcttggacatccatttctttactattctctctttggtctctttctatcatttaagtagagcgtaagaaagggatatgatggtttttaaattgtagagaaatgccattgttgttttaataatgagctcaaattaaacacaaaacttcctaaaagttatttcactttacaggatagataccttttctctttaccatcatgtggatgtttgtccctggcagaaacacctccctctgtgttagtgttacattccagtgatagtgctggaccaaaggctttaagaatatttcctgaagacaaaatcgttattgtatggagaaagggtttctcacaaacctggtaacaacactcagatcaaaagacatggaaatccaagctcacttggagaaaatacagaaatatgtaaggatgcaccttatgatcagaaattcctgataccaggggcctcaggcctaggcttcgctgatagtctttggcttttatcatccatccttacatatcatgcacttccaccatcattttcagactgcatcattccatgtagctgcaccaagtgtccatactttgatctcaacctgtcttcaaactcctagttcttcctaaatgaaaaataagcaccagccatttgtatccaacaccctcagagaatcttaacaagattctcttttttaatcattgggggagggattgtactgcactgtccagtttattgtgaatctgagacttagagcaagtcagatatttgaccaaggatgcacagatggtgagtgattgagccaggaatcaaatccagttctcctgactccattacaacatttcccttggactttactctgaaatgatcagagcagtggcctttccgtcagcttagaagtcctatccacccctcttctttttagaaatcttaccctctttcatgaacctgctcagctcacagaggtcttctggacatcccacctggatggggctattcctttaacccacagagcacttggggtgatcactgggcatccctgcctgcacagcagacagtaagaagcctgagagttataactttcaggtccatagcattgcttttccactttctagaatattgttttgagtaactcactgaattctgtctctccgttgcttcagcctgtctctcaatgttaacatcagccccaaattccaggattctcaactcattagagctacacatacatagatacatatgatgcacatacatctgtgacctgtgccaagctcacttccttttgcccaatgtctagtagactactcatgcagaagggcaattaaataggttgagagacccatttactctttagttctaaatctcacacccctattgggtaacaattctggagactttttagaggatacataaataacagggtcctgagaggtgtcaggaaatgtgggaattgttggttgtgggtttttaggtagtcatgcacaaagaagaaattacatatcctgatggtacagatcaaacttgccccaaggagcttcatgcccctaatcattaggaagtagtttaatgatatcattttcccactgctgatcctggactttattcaaggatatctttcctttcctctctatctttttttcttttttatctagtgttagtgggttgaaagggtggaagaaagggggtagagaaagaaagaagaacaaagtaacaaaataacaacgtgcaagccactagatattaaattattttcagttttaaagtatatttttactttaagaatgaaatacgtaacgaagtccaacaaaaggtatatacttttcttgatgatgtgtgggggagtgagagggaagagttgccataaatgtggtcaagatgcattatagcatatatgaaattaccaaagaaaaaaatacaaggagtcaaaaagaatcttagagttaccacgatgttgttgaacatctatttatttctgaagcttgctctagttgtcactttgcatgataggtacctttatatgtagcagaagatggcctagttggccatcactggaaagagaggccccttggtattgcaaactttatatgccccagtacaggggaacaccagggccaagaagcaggagtgggtgggtaggggagcagggtggaaggagggtatagggaactttcgggatagcatttgaaatgtatataaagaaaatatctaataaataaataataaacattcttacagaaaaacccaacctcctttgatactatccttccttctttaaaacataccatgtttaacatggcatggattctctggtgatgtgctgattagcagtaaggacaacttcgggcaaagcagtcaggtgaacatttgtgaacatcatcaaatgtacttacactaggtggctacagtgccattaggagactcaagtttccaggacactgtcatgggcatggtccttctcaagaagtacatgtgtatctgagctctctctgcattatgttcctttggacataatcatttcatatgtttgtgttttatattcatttcttaactttgccttcataaccttgttggatttttcctggtttcctttccttgccctgctccctccctccctcttccttccttccttccttccttccttccttccttccttccttccttccttccttctttcttccttcctttcttctcttctcttctcttctcttctcttctcttctcttctcttctcttctcttctcttctcttcgtctaagacctcaaatcccagctgttctggctctcttttaatgaagagggcacaagaacatcttcgttatatgaatacatatgtatgtttaaaaacttaacttcattcttattataattctaaaatatttcctagaagttaaatatactccagtttccctagcagtataaaacattggatttttaatgtagatagagttgttctaggtatcagaaggtctatcactggacctaatgtctgcttatagtttcattcattcaatggtattcctcagcccctccagggtgcttgatatggcccataggtcaattcttaccccaaatattatgccattttcagagatatgtatatgggcttcaatgatcaagatggcgatgatatagaaataccatttagttattggactgaacaaccaaaaacccatgagcacataaaaacacattcaagttcaagttataatatgtttttgactaatctgtaaggaatttcagttggtagacattggaacttttgagaatatttgatccaaaggtattgctcattgctgtgcattaaaattaactagtgttttgcctttgtgcatgaagttcaattgatgggtagcaatatcttgctttgcagcatcctggctcagagggaggaagtgttgtagtaagttactgatgcggaccactggcggggtaaaggagaatgctggtgtgcacgtcacaccattgccatccatgctgttccttgctttggatgcaaagagagcatcagcatctggagagcatggcagacccagtgaactctttggaagccacgggacagtttgcttcagagctgtgagtggtctggacgaagaacagaaagagatactggggggagggaggcttgcaagggggcgcagagccctttcagttctgcatgtgacttgagacagcaagtggcagcaagttttgcatagtcacttccaccactttaattgtctgagcatggtggctgtaatggatggcaggctctcctttaaacataataaatggctcacaattactttactttggagagtgctcttctgccctgggacactataataacctgcaaaggaaagaaagggcctagggatttatgagatgtctccatttcaaccatctgggagaaatacggcacagtgccggtgtggccatgtgcttacccgagttaatctatcatcgctcctgctatgagcccttttctcacctgtttaagactatcacagggatttgtccctggtcttcacaaagactggccagaaatcatatttttcatgtacctctagaaatacggtccagttgaccttcaatttactggaccgatggggaatttttctagttagaaggaattttagaatccagtggtgatatttttaaaaaagactaatgagatgtagtctcttcctgtagagttttcaaggtcttacttgagagacaagtagtgaataagtattctctgtgtgctctgagaaatgcggttggtgaaacctggagtaagactggagctctgcctgatgcggaagcgaggggactgcttaactcactctgaatgcccttccgtgaattatatgaagagcctgcacccgcagagcgctttccgaagtcactgggacttttttgtgtaccatcttccctgctgtttctctgggtgaccactaggtctagttcttggccctgccagcatctcacccagtgaagagcatatatatactgtgagtgtgaagtattagctgagcagatgcaagattgattatagttctaaattttctttttaagtttctgagaacttcatacatgagtatcatatatgagtattgcatctacattactcccctacagcgtctcctgccttgtgatctcttgccttacctcttcagcatttcctaccagtaggcaccaccacaaccagccaaatcatctaataccaataccaggaagcaaaacttattacataaacttaaacccaaatgtatttatccttaggatgaatcagctggacttggtagtctcatggtagtctcaatgttccatctgagaatagggcttttaccatgtcacagtcagccttgtgttttctgtatggggagaggtagttagagacggatggtgaggacagccagccctctatatctatagacatggtatccagattaggaatcaaaaatctttggccatggagggttgtctctatgctgagtgtatgcagcttcttccttgtctttattctataaacagtatgttaggaaagctactgaacagcactgatgttgtgttaggtacagtacctcatttgcaagtgatttgcagtagaggggaggatataggtaggcgtttgcaaacactatgccattttatgtaagagattcagatcttcagatttgagaatccacaagtatcctcaaaccaatccctcgaagatactgaagggtggctttacgtacagttgagtgttgaccagtgtgctcctgtacccaccacccatctgtctgcacaaggcatccccagggttggatgccagctctttatggaggatgtgctgagtcagctatggaggatgtgctgagtcagctatgcaatgtcctcagctctacagccttgcctggcaccagggcttctttatggaaccagacgttcttttcccactccatttcctctgagtttgagcctaagcagactgcttttaaagtttattaaatctcccttccagtggagcaggttctccactttcatttgtcactatttaatagtgaattcaaaacaggctgagagatttaaaccggcacagcttaggttttaccttcaaaatgagaccagagacacttcatttactccttcctggtgtctgattgccacatcataggaggctgttttatgtgtacccgctatgttcctcttctcttccattcactccacaagtgaattgacaacaagaaatatacagatgagttaagtgaaattccaacattcagctgttgagaccaaaggagtagcccagtggccactggctccctcatacaggccttaaacatggagcataaaggaggcagcgatggacctcacgcggtctgcaagcggctgtagtgcctgctggcaggagagctatgcagaccatgtgaggaggagctgaggtaagggtggctcagcagggtaaaggtgcaccctaagcaagcacgagatccggaatcccccgacaaccatataaaaggtgggtgtggcagctcatgttagtaactccgaggctgggagcagggtggagccctgggagtgactggccagcccacctagcaaagtcttgcactctggcttccgtgagaagccatgttccagcaaataatgtggagagtggctgaggacaacacctaacagtggcctctggtctccacatgcatacacacgtacacacacaaagatacacacacacacacacacacacacacacacagcgagaagaaaaggctgcctaacttgtgttaatttcccgtcctaactaaagatctcagcaaagtctgattcttcctcctcccccattaccgggcagccatagttcaatgaccacagacccccccccccccaactcgcagtagctctcattcaatagactttccagctgggagtgttctgtgtaaattcaaaaggccttgcagggactgtgcttcggccgtgctggcagcgtgtctatgagattcgtgagcaggaattagaggaccaaaatgtaatgtgcttgctaaaaatatgctccccttttacccccaaccccaataaggaaaaaatacaagccccctcccctgccctccttacacacacttgtagtggcttgcctgtcctgtcagtttatttaaagccatgcattaaatgtcattctctaatgtgattggcacaattcctctttgcctcgggctgattctatcagacgctggtgaaaatatctttctcttgccctctgggaccttcagtttgctaaccagcaaatttagcccgattgcccatgttaatttggctccctgtttcagtggggcaacgtggtttgtcacagtgctacatgcctcctgatcataggaatgcaactctccagcttcctccatgaaggagcagaggcggcagggaggagcatgcgcttccctggccgttgttcttctgtgaccccagcgctgattgccttttacatgacttgccggttgaaaggtttacgatttttaccacctatataaatgccttaaaccttacattaaaaggactccccaggaagggcagaacagctgttcacattacccaccttagtcttcagaactgggcatctctgtattatcatctgcatggaacgcactgagtcagccattatataatgaattatcttggttataacgcccaaggtcctcagagatctctgttcagatgatgacaggatgcttgaagctgtcccactttctctgaagcaaaaaccagttagtggaggaggaaaacagcaacccccttctgttatggtctcaaggtacacttgaaaaatcacctttgatactctcacagctgtcctccctcagccctacctggactctgccagtcacaagtttgcctgctcaggattgatacacagtggatggttgctctgctctagtcatgtatttggggatgctaactctgactgctgcccaaggaattgtgggctccttaggaaaatgtttgccgtccttctaaaagcattcatgattgaagttaccagatgccttcaacacaggctctgtggctacatcagaaagagacagcccaggaaacagggtatgaccctagtaaaggtgacatctgaggaacctgtccaaacaggctgggagcagtcacttgcctggctatagctgcttgctcttggtgcctgactgttcttggcaagagcactgatgtcctctatattttagtggactggcaggtggtagcagctaatgactcaagtcctcagctggcatctgtatgtcacactaggcaggcatgctgagagcaagagcagccacactagccttccctggcgtgtcagtcctcttacctatctcatccgtcctctttgctcaagcccagattcctcaaccccaagtgtaaattagcatcctggaaggaacccatttccagaaacccttcctagaatcaaagtcttgatgtttgagccagacaaaactcatcctaaactctgtttttctctgatggttggaaaccactgactttgggggctttcttctagattctttcttttgacgtttgatgaaccttcaaaacataaagaaaacagatgttttccccaataactactccatgactggattgcacaggttctgaagacagagtaataagtgaaggagacagggagtctacatgtggtgcaggcagtactgtcatgggggatgtaggatcaaatcccaggtgtgcagaaagaggaaggcatatcagcagtgttttctcaggcagaactaaaaggagaacaggtattaaaaggaaggttcaatagcagaaggaaagagagcaggagggagggtaaaagagtagaagccaacgtgctgactatcccgtgtgtggagaggtttcggagttcacgtgtggggcccagcaaagatgagaagatgaaagatgccttcgtgtcttcctttctgttgccgggacaaagttcagtaacaaaagcaatttaaggcagaagggcttctttagttcacagttctaggctgcagtccatcatatccagaaaagcactggcactttcgggaactggtcacatcgcatccctaatcagaaagagagagcaaccatctctgcacaccagtgctctgttcatgttctccatctgtatattctgttcaggcattttctgtcactcattctggaagggtcataccaccttaattaatataataaagataatcccccaaggacaggcccagagcctcatctcctgggtgattttagccttccattcaattgacaattaacgctatcacaaccagtgacatgttgactgtccagtctgcacaccaaaagtagtactcagtcactatagtttttaacaagtgactgacttggctttatcatttgaaagggggtggaaattggaaggagaggctagaaaggacagacttaagttcaaagtctactgatcaaagcaggtcagatatggggcaacagttctaggaaaggtcagcacatacactatgaaatgaacggaaggaaagggcaggagaaagagtcaacatcccactagacttcacttggcagccatgaccctagagcaacatttccagctctttgtgagcaggtgaccacctaatccctgatggttccatgttttctgatcattggttcggaattcacgagtgggtttgcttggcagtcatatgagtacaggtgtctggttccttcagaacaggctttgtcatgtggatgaatgagatctcagaactctagctggaaatatgctaataccatagggaggattcagtctccagaaaactgttcctcttcccagctcatggtcctcagctccttaacagaatgtgccaagtaattactatactctgaagtggtgctgtacagagaaagaaaggacaagtctctttgtcctcattcaacacaggctggtttttgtcgacaaattaggccttgttgctccttcagatagacatggtagaggcaaggttctcagagcatcatgaggaggaccacactaaagaaatggagacaaagtatggttaacgataccaaagaaaatcatatcgtttgtgagatggaaaaaagccatctcaggtgggggaggggcagtgtattctgagagcttatttagaacaaggcacccaatgtccctcagcacctttacctgagttggagtttactaacatgtgaggggtgagagaatggctgacgctctggaaggttgtaggcataaagacaaggcctcagcagatgggaataggaacacagagaagctctgtgggtcttggagtaggacccaggaacagtttaaatgaatagaagttagattgacttacccaaggcctgtctggttcagtttttaaaacagtcttccaaggagccaagcttttctctgtgaggtacaaatgtcctatgggaatcccacactgtgttgtttgataagaccttacagagaacaaactgtgtggggtaaactacccaggtgctgcagacatcgcctgagtaatggaccaatgccaacacaacaacaaatgcatatcgtaagagctcaatccctttggtgtctgtggcagtatgggcaccctgggtaaagtgtttcattagccatttactgatgcccctgccttatcatctgcagatttttcaaatcaatggccgatgattccatgtctttcaaagaacggtgttgaaagtgtcttgttctgttctatacatgacatgacgagaattcacatcattaattacaaaactgtaggagctagaatttattttgcaaagagctagagagatgtttcacttactactttatcatcttaaaactaacaaacaaaaacaacctaccgactcttccatatgttgcttggcattgagagtaacattagaacttcttagggccagcaccagaagaaagtgagcccggggtgggaaagctagtgttggcccaccagctgctcatctatgcttcatacactccattcttattcctcctcctggctgcagatgccagtcaacccgtctacttttagggaaagttttatgctttttgtttttccaagttgaaaggaagatttaaaggcctttcttcaaggtattcttcccagtggggatagtagtcttgtatcagcagttaatgaggctcgagcatcaggtttgactagaaatatgtccatgaatttggtaagggattcattgtttccaagcaaatattcaactgtggtatataatgaaaggtaaatttaaaagtgattttcctttttaaatttaaattttatttttacgtgcaccggtattttgcctgcatgtatgggtgtgtaccacttgtatggctaatgcccacagagtccagagagcattgggttccctagaactagggtgaatgacagcatgtgggttctgtgaaataaacccaagtcctctggaaaagcagccgtttctcttaaccactgagccaattctccaggctatcttcttattaaagtagtgccatcaactctattcatcttcccccttggctccttctgtctgttttcttcggacccataagatgctattctcttagagttcaccagatatttgttgggagtctgattgaaaatagcaagagtcccattcatatcaacttaagaaagtagaatgtatatccacttgagaagaagaaaattttaagaaaagaaaactgattcaggtaccaaaatatcaaaaagtaaaattagaggaatttcagattgcacaaagcataacctctgtcagtcctctacaattagtgcccggccttttgcctgattctgttacgctgtctagatgtcccatcatcctctgtattaaggggtatgtttttagtcttaacctgagaaagagcaggctttggctatatcgcaagttaaattggaacagcctggacaagggtgctgatggagcagttaggtcacatgatcacctatgagcccaagcataaatctcagcagctatgacgtggaaactgccatctcttgggacacttccttaaatacatgcattgggaaaaccacccagctctctgaacttccagtttttcatttgtaaaacaaaggggatggagtgagctccacactgtgtcagttttgtcctgatactgtttacaatgccacttctttattttaattattgcaccattctcttgcatgctccaccatcctaccagaagagcaaataacactggaaaaccattacctcactggcttcactccaaggctccctaaatgggcagcgggcaacccccaatggcaacacaccagaattcagtcttgagcacatttagctgttgattatgcttcatggcatgaaatatttagaatttcaaaatttgtcaagcatcccaaattgacaattatgcctgagtataaaaacagatgcagttgaagttcagctggaaagtgtcctgtcttgttacacttggagcatggaatgaagcttaggtagtcgtttctgatttagttgtagccccggttcagagctgctaatgagtggaagtgttgtaggctatttgtctgagtatacaccagtggaacccccattgttcctctaaagatgatatcaaacgtctcttgaatacagtgtctcccatctgtcaggagtgtgtcaccattggttctctccacacttctgttgtgatcttgggccttatttccatctcattagaccgttagctcacagaaggcagagtctgtatctgcttcatatctcttcaacataaagtcaatattatagccatcatacttggtccctgagaatgcttctagatgtatgttaggcaagttatcaatcttccctcagttcctttatgtgtacaatactcctatcctgttcctctctattagagaggggattaaatgagatgatgcctaacagagtgctggcttccacgattttcacaaagcagatgcacatacatagttttatcttatttttaaatgtctaaacagcactagggaagggtgggataagaagtggtagaatatttacaaacttgaaattaaatctcagcttatctgcataccaactgactgtgattctaagctaatttattaatattttgaagcttcagttcttcataaaatagaagttatatgtgtttgctgattgaagtgggtaaagagaaacaaacacacacacacacacacacacacacacacacacacacacacacacactcacacagtacctgctagggcagtgggtacttggtagcaaacccaatcaaaggtaacatttgtaataaaagttctcatttgtaatgaaggatgaagaatagctactggataccctgtgggtcctctgaccttttttttctttatgtgtttgatgaagatgaatatgcattaatataggcaatggttgatggccccatgtggacctgtctaggggcataaattaccatgtccttattttcttgaagtttccagtgcgatatgtctgttgtaatataatgatttctctgcttagtggccgactcaaagagaaagaatatgtacccatttccaaatgcacaatgtgtatgaagacttagaccctagtgatatgaggatgaggtctgagagctgtaggtatctctgtattcatttgagttggtgccagccaaactgcacagttaattttatcacagcaattttctcctggaagaaataattaatatgcaggcttttagctgtggtttggcctttgttgctttctgacttttgagtttgtactgtttatactgctatatcagtagctgtcagataatatatagagcaaataggcactctcccctgcccttcacttcagcttagtctattttcttccttgtggttcccacagtttaagaaaaaatagaagtatacataatgaaagtttatcttttcagaaagcacactcaaggttggagccctgaggtcacactgtgcaccagggagcaaggagcttaacatgggagtcgtttctgaacaggaaaggttggccccaggaatgtaatgatcttgttttccgttgacaggtaatgcaggtggtgaaggagcaggttatgagagcgcttacaaccaagcctagttccctggaccagttcaaaagcaagctgcaaaacctgagctacaccgagatcctgaaaatccgccagtctgagaggatgaaccaggaagatttccagtctcgcccgattttgtaagtaacccacatctgctcggtctctgctactgccccctaatgaccgggtgatgtaacagcagggctaggtgtcttgttttctcatgtgaagctgtatttcacacaggtacttcttaagtggcaaaatgtcatgctttccagagagaggcacaccaatcattaaagcattgagattctgaggtagcataagtcctagggggagatgtggagggaaagggaacaaccctctgccttccccgcaggtaggccagcggttagcatcagagcatctcctgtaggccagcggttagcatcagagcgtctcctgtcgcctttatagctgtaaatctagaggatcccagggggaaggcagcagagacttcctttatttatagggctttgcattaaatgtcacttgcaaccattccaaaacttcatggatctccttctctgaagtgttctgaatctggaaaataagagctcttttgttcacctcatctcttctgagacctggcctgtttttctttgctaagaaccagattagattcatcacctttgtattttatagaaaaggacagaggggtaaaggtgggaagcagggaagggactccacagttatttctgctctgtcacaagaggattagaagtgacttcgtctggacttttatatgtattatctacttttctctttctcgctcagtggcatgtgtctgtgtctgtgtgtgtgtctgtgtatgtgtgtctgtgtgtgttctttgcttatatacactgatatttttaatggctgacaattcacaaaaccccctttactctagctcattcctcacttcccttgaggtaggcacgtgttattcccaaagagggagaagcagcctaggcaagaagctggccttgaacctgttgggctctgagctcctccttcatccacaccatcagattggctctgcatgtacaagactgagagtaagttaaggaaatgtacaggttagagagcacagtacccaagtggtgacatatttcatgcgctttcagttcttaagcacctccagaagctgtacgttagaactgtagacttcagtgggcatgaacttcatcagcaggggccagagaatgcttctaggggacttggctcatgtcattttaaaccctaagacatatcgtgcatataatactggtccttttaagagacacaactgggttttttggttggttgggttgtcgtggtttggtttggtttggtttggtttggtttggtttggtttggtgggattttgtttgtttgtttgtttgttttgattttttggtttgttttggtttggtttttttgttcctcagccacaagatagttgcagtcagaaataccaagcacagggtcactggaatcagtaactaggtcttgagaaaagcagttgctcactcagaaggaggacagatggtgacacaccttttcaggacctaccttcacagaatgctagatttgcagtcatctgtcctagccagtatgcaaacacaaggacactttattatgctctgacaattcttaaaacctaaatggagaactgaagagttgattaaatgaaggccaagtggctctaaattactaccacttcagcggagccaagtgagtctgattcagtgcttgaccatgactgttggagaggaggatgtcggctctgcccagagtgagcactgccctgctctgccttcctgtgcttgcaaagctctgctccatgtgctgtcacagatgtgactttgatacccctcttgtctaggagactggaaagcaccaggtctccctggaattgttggtaaacataactgcagcacagtgataacgagctgatagaaaaccttagcattgcaaaaagaagctgagggaccagcctgtagctatagcctctgctagcagcaggtaggaatcaggatacagtttgtctctgagggggatctgtttggtttattgctatgatctgctagatggggaacttatcgtggggttggatgaaatgtaagtcaacttaaaatgagttaacatgactcaagatagacaaagtcaccccagagaacgaggaggatcgctgtgcatgtttagtttctttctttctttaatcattttaacaaatgcatattgggcaatccctccatggtcagctcagcccagggtgctgagaagcactaaggtgcctcagtatccagacttcacaagttgggggaatggtgcggttgatcccagactgctaggtgttataggaagcacatctaaatttccacaaagatcacaggaactgcatccatgtcagctcagtgcttagggtaccaaagctggtaagcctgtctagttcaagccctaagtttgcaaacaggggcatcagccaggctagaacatgggcaccaggccactgctcttcactggctctctagcatctcctccattgcattctgtcctgcccttggctgcctgagcatcacacataacacactaccaaacctcagctccatgaaaacctcatcaaccttgccttgataaaaaatggtcatgtatcccaagaaggaaaaaaggaaactctacccaaacaaatgtttggtgaagagctcgggctgaagaagcagcctggattatttcctggttcctgatgaatgatttccaagagtagctacgtttttgtttgccacttaacagagaagataaatctattctcattattggtacaggctaataaatatacagagcttaaacactccagaaataggtcatgtaggactgagttagaagaagagaggagacaaggacagagcagtaaagcaggcaagtaaaatgtgctgaaacctggagctcagacaccagctcggttctcagtgaagccgttggcagctgtgtcacattgggaagttgcacagtccattctaagcctgccttttccctctccaagcagtgaacatcatccttttgttaggctgctacaaggattcacatgactatgtgtatatgaaaaggatttcatatgtatgtgaaaactgaccagcacatgctcagtttatgctatgcactgagtgaatgatcactcttattacaaaacacagaacttagcaaattgtcatgttagtagtgtacataaatagaaaacctaaaccctgagtgcatttgtatatttgtcacaatggctaaaaatatacaagagaaatgaatcaggaaaaaagacctagaagtaaggctgatatatacatacacacagacacacaaacacacaaaccgcacctttcctgaagactaaaaaccccaaatggttccagcaaagtcctaaccattatggttctagatgcctccctagaatcacctcctaaagaccagctaaccagcctagtgcttcactcaaagccgtttctagtaggtcagtttatataggtatgcatgttccgtgttcaaacatctaacaaatatttatcaaggcctgaaacatgctgggcattgttttgttgtagttgtttgtgtgtttgtgtgtttgtttgtttgtttgtttgtttatggttcaacaatgaatagaacgtatacaacatatacaccttatggtattaaattttagagggaataatagataatatacatgtataatatatgtaaaagaatagcaagttatgttgtgatagaatggctatatagattgaaagtccacatggggcaagataagaagaataaaatataattataaaggtggtaaaatatctctttaattgtaatgatgacatttgaatgaagatatatattaggattcaaggagcatacaaatttgtattggggtgaaagaattacttgtgcatgtatcctgaggtcagagcacacctaggtttttagtgaaccatgagataatgtagcagaacctgagggagtgagtacagtggcgataggaggtaattctaaggaggcatctagaaccatagtggttaggactttgctggaaccatttggggtttttagtggacaacaaccatggagttctgcattggaaacactgtgaggaggcccatttaaaggcaagaagggcagtgagggagctgtaataataatttaagcaagagaccataagattaggttttactctgcattagttatattttgaagaaaagggaaatggtatttcctggtagattttatgtagttgtagaaagagaagaatcaaagatgggctctaggtctgggcctaaaccaccgaaaggcagcactctggggtggataatgtgagcaaggcaccaggagttcatctctgaacattccaggctatggagcatccgagacagtggtcaggcagatgagtttggaggtcagcagatgggtctaggttagaaatacaaatttgagggctgtcataataaaattggtacttaaacccatggatctgtttagttaggaaacagactgggactgggccctgaagctctctacaactgagacagaaaaagatcagtttctaggaaactgccattctcactcagcccagtgcttctgaagtgcccttctccatcaggtgtcctcgaatcatagttcttgggtcaagtctacacactgtcactttctgtacatgagtctgactaaaattcagccatattctttcatttttctattaacctaaaaacctagaaagcctaaaacatttactatctgatgctttttagaaatatttaccaaaccatgttctagatgaccagtagtatctcagctgggtagacagaaagctaagagttaaactcagtctagtggtgttgtctgtcttccaagtactgcactggccttgctgagcttagattagagttgtattctagagaaggttctagactgaactgctgtctaatctacctgctttaatctctctcttctttcatttataagtcagcatagaacccatcaccccaaactcaatgacaacaagctaaacatttcagagggggctatagcccagtgttttcttatgtggcatgcctaagaggtcatatctcagtcacagaaacacattggtaagagtcatctgggctttgggtgaatatatggctactgagtctatttgcaagaaaatcgaagaagttaaaaaaatatttttaagtctttcttatttccctttgcccagttgttttagagcttcatttaagaaagaaagagagagagagagagagagagagagagagagagagagagaagaaagaggaggggagggaagggaagaagagaggaaggaaggaagaaatcggactcttaaaagttcccttgagagatacagatttagttcttctttcagtacatctactggatatggtaaaggcatgtgtgatgataaatatatccaagttttattcaaaacgtgagacatcattaaaatctcttggactttcctatttttcatctctacattttaatatcttaaccatggcctatcaaagctatcctcaaaattgatgtgttccaaactcttttctcctgtgctctctccatccccagaggattccttttcttctttgcccagttaccgagacttagaagactgcagctgtgatttaccaccatgaacagctgcctatgcagtcctcaacgtccccattccatgcagggttcattaaagctgtgatttgcttagtgtactttataaaagttgagcacgaataatcaatagttataattgtgatctggaatcctgaccagaggccctccaaggcctgtggacagaaagcttcgcaaatgctccaagctctgtcattagtaaggcacttccataccacacaggatttcaagggcattttagctcccaaatgtgtactagttgtcataatgacttttcccatggctgtgacaaaatatcctggcaaaagctagttaaagggacaaagtctttatgttggcttatggttgaaggttagtgtacagtatgccagagaagttacagcagtgggagctttgcggaatataaagaatgcttgtacatggctcactgtttttgtttttgtttttgttttttaatacagtccagggagtgataccacccatagttagcagctcttcttacctcaattaacacaaccatgataatatcttacaactatacccagaaacctatctaccaggatttgttaagttgaaaattaagtttaactaccacattagttcttcttatgttactttttcaaaaacaaactctttacttattttatgcatataagtcttttgcctgcatgcatgtgtatataggcatatacatgcctgctgcccacagtggccagaagagggcaccagatcccctggaactggagttacagacagttgtgagccaggtgggtgctaggaaccaaatctgttttttctacaaaagcaacaaatgttcacagctgccgagccatctctcctgtcctgcttgcctttctctttcgttcatattatcacaagaaagactggagtctttactctgttctacccttggccttcatgaggagttgccacatctgtaggatagaaatggtaatattaaatactcatcctccaaattcctggaagaagtgaaattaaaggaggtaaaattacacaatgtacttccagtctcgtgagtactcgctgagcacaagtgcctaccccacccacaaatcaagaataggtggaagcagatgtcctgcccagagccagaaagagtacagactcaagatcaaatctgatgaatacatgagccttgggtacctgtcataatggtcatttagagtgtttagctaagcaaaagcgaggtgatcaccgaggtatgtgatcagcactgtgtctattactgtccagtgtttataaagacagtgctaacactgtctcctttgggagtcatagcattttctcaagaccgattctagtctttgttcacagttaagaaactgagactcaaatgagctgtgtgaaacactagtcatagacatggcctagactggacctggttttctgatgtctggatccatgttataggcaatacttttaacacatctctgaggactgagctctgccgctccctgtacagctttgatcagaatactgctgactttactagcctcgaatgccaggatgctcataaagctttgtatcatacaaatcccttaaaggtttcggaaaccactgcactctgtcatggaagctttgccgtgtagttcatctaaaactaaattacatcctattagcctgagacaagttagaaataattttaatttatcccatcattatctcaatctctgtgggctagaatctgggacagtgttatggttctcatttgtgagagattgaatggaaagcaaaaagggatccttgctcaaggtaccgttagtgatgggatctagcaattgcatggtcacccgacattcctgtttggtcagccacaaaataggaatctatttcttggacttttgcctaaaacgcatctatgactttgtaaataaggactttcttagaaggctttgttctggggaaaagtcacaaaagtggctggtacttttgtggatagtctgtaaatgtcagaaacccaatactgttatttcaacaggaaactcaggcctagattttccaaacaccacttagaaaaatctctaaatgattctctaaagcagtgctgagaaggtcctgaggtgttgatgaaagaaggccgcttatgctccctgcccatcagctcacagtgggctgtttatcagggtgcactgtgtaatacaatgtgtttattctccaatagggaactaaaggagaagatccagccagaaatcttagagctgattaaacagcagcgcctgaaccgccttgtggaagggacctgctttaggaaactcaatgctcgccggagacaaggtatggtttaaggaattccatataccagcagggaaaacagtagcttgtttcttggtactcacaagaacatagtgtcattcaaggacagcattgtgcttgataaaagaatgtcagtataggttagttcttgttttatgtgtagggagaaccaaaatacaaatgaccaaaagatccatggagctaaagggctgttctttggcatttagtcatacaaggctactactagtggtggtgccaacaactgctaatacatgctgtgactgaaccctgtgcaaggctattctctcaatatgtttacacacagccatcaatcatgtgtcagtcaacaggggaccacacatccaatggtggccactaggaactttgtaccaccttagtttgtgtataaatgtacttcacaaccatcacatgatggaatcacctgaagatgcacttcttggaatgtatcaccacaattgaataatacacaattggattaatgaaatccatcttcagaatagccctatgaagtacttattataattgtgcacatttgtacataacaaaacggaggtcctgagagttgagtaacttgtaaagttctgggaaagcaaggaattgccctctaaagctacaagccctttcttctcgtttttgctttttaaatatctattttatttatccttattatatctgtgtctatatcactcatgtgtgggtaaagttgtatgcatgccatggtgcacaaacggaggctggaggccaacttttgtgagtcttttctttcactgtaaggtcacaaaattaaacttgtgtcaatagacttccacagcgagtgctttttacctattgagccggatgttaccagatgatgctgagccactgacaccacatccttctttttgtgacccccttgcaccatcaggaaattggccagcactgtctgggtgcgtcttggcacttgcagcacggatggttcatattctcaaatctctcacactgatgctgtttcaggtcagcgttatttttgcggggtataagtaaggtgatttaagaatctatttccagaatcttccaagacagatttctgatctgtctctgatttctgacctcaaaatgtcaaatcaaaaaagacagcagtagaccaaacacattaggtgagaagcaccccctgactgttcctctgccttgattgtttccttgctgtctctatgtgcttgtgaccgtacaaagcattaataccatactgtccgagaagaaaacagtggggagacaaaactaagatttgagaagaggtgaggaaactgagaaagagccagccataagcagaagcatcaacaactgtgcgaaccagtattagtgatgagctgggagcaactctggcaggtagttctaaaacccaatagatgctctgctcagacacaaagctcacccactaatgacagtaatcaatttgtgtttgtgcccatcttcctgcctgtttactttaactgctctgggctgagtgctcagtaattgaaatatgtcgatgctaccattgaaaatcacactgaaggacttcaaaagccagccagaacttcctagagtaagtgagggttatttgaaaaggacgagaagcctgaagatttacactaagcctaggaaaaggattggggagatagagaggggggcacagagtatcgaaaggctgagttgaacctgagaaaggcttgcattataaaaggaatggagaagagaattcatctcctaaacttagccctgaacaatgaggtcactcccttctttctcttgcattccttttgctggtcttcatgtccaagcacacgatactccaagaagacattatactctagtgctaagcattggctgcccttgtacaactatatggacttgagcagtttgcactcagtatcaatacctgtttcccaagacttttgcaatgtagccctaggagtcaagctaaaaagaatcgctgttcttgtggaagagtgtgtaaaaccagaacaaaacaaaacaacaacaacaaaacaggtctgatagtgaaaagactctgtcttggctttctcagccctacagctagccccattagtgtcttcaggcaagacatctgatgtctgcaaaccctacaatgtgggagtctagcagcactctcatctctgagacctattagctagttagctgtatgccctcatctccttcttgtctctgagcagatcaatatccagaatctataggcccatgagtgtaacttaaaacattttcttcttgtacttgacattgagcaaaagacccagaagtatttggaatgggaaaagcatatagacacactaaaagcagtcactgatgccagtagactcccagtgcttggagttagactgaaccttcagaccagtatcctatttgatattcctttctggctgaaatggatagactaccaaaacttccttccactataagataattgcagatttttattttaaagaatatttatccttcattgttgattaattttctttctttttgtttttgtttttcgagacagggtttctctgtgtagccctgactgacctggaactcactttgtagaccaggatggcctcgaactcagaaatccgcctgcctctgcctcccgagtgctgggattaaaggcgtgcaccaccacgccagaccaggttgattaaatttctaatgaataaaggtgttagtatctagctgatgaattagcaacacctgggcagagcaatacaagtctgattatcagctttctgcttgtgatgcacaggctttcccattgctccatcagaacactgcatttagattttgcacagccaagtcagctgggctgtaaaattgatttccactccttcaagtacatatatgttcaaggagactttgtcatagattagatctgttactccctgcgtaggagccatggccacatcgtttgtcccgtccaacttgtctaacagggaggaggacatggatgagcagattcagtagttaagctcacagggaaaactgaaagttccctgtctcacagaactggaagtggaggagtttgcaaaacatcttttccttagctacattttgtcagaatgcagttggaatttgcctatcatcctatctcatccataactctgatacttggacaatctgatgcaaacaagtctggtcttctggaatatctggccatattcatacctgggagacgacagtcatgtgatacatattaatgtggcttaagtcccagtctctgcattccagtctgggcaatctactccttgaccgacctggactcttttcctctcctgtcatataaagatgatattacttcctacacacagtgggtagtcgcaagggttaagtaaaatctctttaggacttaatatgatgcatcaagcaatcaaaactactcagaattattgtaggttgcacattctgggcatataatttttaaacataggaagcagactgctattggatatctaaggcttgcttttctctttgtgctgacacaatgtaaggcttgccattcttctctgtccatgtattcctagaggggagagcaatgatatacacctagaagttgtctgtggtacagccattattgcttcatgagagtgtagtctccaacatttccctctgctttctacattttagaaattcaggtttctcagaatcacttgcattgaatggtcttgataacccttgggctagataccagagactcatttcaaaaaatgataccataaagcttgcttctcatgaaagatgcctggtacgttcctgtctttaagtgccaacatgactgagttatctcagaattctgcactgagttaagcttgtcttcccacttcagacaccaaggccttagtacctcacacacctctcataatttagtcagaaacctggagccaaatggaccattcaggcgcagcatctttatcaacccttctgggcagcaagctgcttctttcctctgttttaattacatttctcttttggtgtttcatgaaacctaatcagctcattttaacaaaaaggcaggtataaataagtgtgcatttccaaatgaaggaaaaacagttgaattttggaaaaatcattcaataggtcaaaataacaggtaaccaccatttcggaaaggtgggagggtagacagtggggttaaagggacatgtcctcggattggaatgagtgtgtgctcgtagccagttctgtgaaggatgcagggtgtacacatcatgtatgctttacccatgcagttaagctatcactttgcaagtgaagaacagcagtctctcaggctataattttgctaagggctaaagctgagtatcggaatcaggtgtataatcaaggtctacgtgtttactccactatctattaagaccagtcatcttcctgagtgtgtgagagttctggaatcctgagctaggagaggacacaatgcctccaagaggcagaattcagaagcatgacacaagtctctggttttgaaaaacattcagtgaatcgagaagtatttggaaggtagaatggacttacctgccaaccacaggtgccattcccctccatgagccaacagagaaatctgtgggtctcatcactgggaaagtgacatttctcttttgaggcacagtccagacctgttctgacttggaaagtttgagtcttaggcaagatgtggaccttctgaacacaatggtgatttgatagagtttagggcatcctagcaaaatggaacatcctaatggaaatgctctaacaacataggttaggaaatgcttccccatgtctgtgacaagaggttctcggggcatgctaccaaatgtggctgtgcacctaactctagtaagtcccctgcttccaaagcagaattaaacagactcaattcttatgtctattgaatatccagcacgtcacaccaatggtagtagttattactcaatattctggtcttctaaagaccaaaaggcatacttacctgcatctaaggtagaataatgagggaaattttaaaatttattttcttattggataaaagaaatgcagataattttcattattgtagaaagttctgttggacagtgttacaaaactttcacttctctgctttgtagcttttagtaatccacatgacatcagaagttgctttaattggacctttccccaggtttctgggctctgctggttagcattcactgtcagcttggcatagcctagaaacacttaagagtaaagcttcacttggagaatcacctagatcaaaccagcctgtggcatgtctgtggtatctgtggtgattgtcctgattactgatgcaagcgagctcagcccactgtgggcagcaccatccccaggcaggtaggcagtcttgggccatctaaggacactaacttaagtatgaacctgtgaacaagccaggaagcagttcctccatgagttctgcctggccgtcaactctccgcaactacagattgtgacttggaactgtaagccaagtaaagccctactacccaaccccaggttgcttctggtgagagttagtgcagtagagaaaagaaatgaaaataagggctttgaaaccctctgatccttaacatgggtagggcacatggagggaggaaggcaaggtggggggaggatcaatgacaaagaaaaggaaaaatgggggagggactgaaagacaaaaggaataagagcaaaagaaaagattgaagcacaaaattgcctccatattttttagtttggagaaggaaagacaactgttaatacattctagtttgtaattgactgcaaggcctccacattagctctcacatcctccatagatgccagtaaacaatctttgataatgttctcattgcttcttgctaattgcttttaatggcgagatccactcttgtgttgcccaaagggactgaggagctcatagcatcacgctgagtcttaaaaggaaaacgcacatttttctcacaaaagcaaactaccaatcaagctgctgctgttgactggcactgatgtctctgccactgtgttggtgtccctgacactgatgtgttggtgtgctgtgcttgtgggcacaggaagcttcatgctcctctatggcagccctagctttgagacagaattaaacaatgccatgatggctctcaccctaagggctacagcttccatgccaaagaaaatgctaccttagcatcctcccacttgatcacaaatcaagatgtgttttttgtctcttcagctgctgcttcattgttttgtaatccatccaaaacttctaaattgctgagaaagagaggaatgcattgcttccatcagtcatgcctagtcccttttgctcttggccattctagtagtggacagtaaggggaacttggatagagaataagagaagaactagctaaaaataggaagaaaaccagggaagggtgatggttctgtaacacaaggtaatttaaacctcttcaaggaaaaagttctgtttagttacaaagcagatagacaggccagagatgcaggtagcctcttgtgtttctgttaagtaagcttccatgcatctttttgaagtatgtggtcttttctggcaagcgataagtagccactgttctgtagtggtttgtgaattaagaatgcatatgtaagcaagagaaattccctcctcttatcctagattgtctttgtccctacttcccaggcctggacacatcatttatgtggtctttctctctaactgccaccatgaattgacggaacatctttgtggcaatcttcgagtgtcagtctttcatgtctgtcattcatttaatgattgcttgctattcctgaagaattcttgactgcaaatattcttagataaataaatttatcctaggcataagcagcaacacaaaaattaatatagtttacaaatgaatatacattgtgaaacttcatgccacattgtcttaaactagcttaatttcataattctttccatcataccaagctgaggataaatgatccctgcaccatatggacttaatggcttcgcagagtacaactcaatcatgggctacagccagcctgcaaagaaggtatttctctaaagagcagacagatcttaatcaacagaagagctgaggatcccagtgtcacacttcactggcctccttcccattacccatcagtaacacacttagccccaaaagttcctcagaggtaacataccttacaaaacgtcgtggtcatcataggccatgtagaccaggccataggccgtgaagtgtttgtgtgcagagaggaccatcatgccctgttatctcaggctccaacagttctgggatgctcagaacacttgatgtcctcagattttcacaattcctattgtaaattctagctcagttcccccaaatgcattcttcttgtggaaatccagtaatattacatttactgactataatggccatgaattagtgagggaataacttgcttaactctctttgaagtccactccataatcacctgtgattgctgaatatataaaatgatttttgagaagttggcaagcccaaataaattcatgggcattgcataatcctcctcaattcatgggcattgcataatcatcatcctcctcctcttcttcctcctctccttctcctcctcctcctcctcttcttcctcctctccttctcctcctcctcctccttctttttttattagatattttcttcgtttacattttaaatgctatcccaaaaatcccctataccctcccccccaccctgctcccctacccacccactccaacttcctggccctggcattcccctgtaactgggtcatataatcttcacaagaccaggggcctctcctcccaatgatggccgactaggccatcttctgctatatttgcagctagagacacgagttctgggtggtactggttcctgctccttctcttcctcctcttcctccacttcttcctcctcctctcctcctcagtgtttcatttagttttagttttcagcagagttcagactcctttaagtggcatgttctagatacagtcagggattctcaaacaattctaaaattctcttatcctctaggaagtcaagaatcacagacaatttcctttcctgggtcaagttgggcattttcattgttgattatgtagcctttacttccatttttaaagctttttgttgattaagtgaatcatggttaagataggactttttcagtgaaacaattttatattgaaaatcttcttttcttaaaatgtaatggacagccagcatttttgtcagagtagtttcaaagcaatttaggactgcgggtacagtaatgaggtgatttgaccaagaccatagggtgaaccaggtgcatgaaagtaccaagaggctggtagggcccagatgccgtgtgcctggtgtgcttgaactaaatctccttaagtcttcattttccagtttagcccagcaccaaccgtgcacacattcagtatccagtactgttccaaagctttgggaccatagccattatgagcacagtggccgacgtccatacactgtccagggtgatgaggaccctggaatcttttgtctgatcagcaactgtttgtggtatatccactagggaaagctgcttgccttgtgtgtaccagggggcattaccttggcttgcttactttgggtttcacagcagggaacattaagatggctaacatgtatatgtaaatcatgtcagcccatgttttatttgtgcacataatttctggagaagctcagatcataatgttactcaaagaagcctttctggtggaggcaacatctaattgagccttcatagctatacaaacactggagccatggtttatcttcttgatctgtaaacatataggtctacaccagtaatatttgcctttttctccctccctttgtcctgctcacatcttctcatcacccttgagagctgaagggatgaaactgtgagaatccagagtaagaatatccttaaattcttggccacttccattcaggcactatactgaagggtttaggagggaagctgcttgtgtatatcttcattctttccctaaatcctaaattattcaggcaatttctgatggagccctacctccaagtatatgaccaatatcttgatactttattcacgtattgtggatatggactgttagcaagtgtttgtactaactgcagtatgaccttgtgtacggctgtctcagcaggctgaagatcaacgcagaagcatctcaaaccccccaaagctattcttccctcacctctctccactctgccaagattttgtggctaaggactagccctgttggtggttacaggcactgatagaatgcccatataaactatcctcttgaaaaatactttgccattgagatagaagggtttggtgacattctcgttggtcaccaatgtatgcagtgcatgatgcaaaaataccaaaatcagaagggagcttcaccatccagcacactaaaatccagtatttcttaaggtctaaaacaatggttctcaacaacctgtggttcgcaaccccctttgcaaacctctgtctacaaaaatacttccactacaattcataacattacaaaattacacttacaaagtagcaacaaaaggaattttctgggtgggggtcatcacaacatgaggaactctattaaagggttacaccattcagacggttgagaaccgcaggtctaaaatcaaatgaatgacttttctcctctaggtagcactgttaagaaacatcatgacaatgtttttgaaaaccagaatcattaaccttttaaacatgtgtttttctcctcagacaagttttggtattgtcggctttcaccaaatcacaaggtcttacattatggcgacttggaagagagcccccaaggagaagtgccccacgattccctgcaggacaaatgtgagtggctccttctctgggttaggacacctaggttttggttcactagttatttctcttcgttctttctccctttctttctctctctctctctctctctctctctctctcctctctctctctctttctttctttctttccttctttccttcttttcttctttctgtttttgagttagggtttctctgcgtagccctgtccgcctgcctatgcctcccaagtgctgagattaaaggcgtgtgccaccactgcctgaccattagttatttcttattcatagtatcccatacagaaatctcttaacttaaatgaacacatttgcacttgactcatcctgtaacttcaatctgtgcattcccaccaagatcacaacctggaaggatttgaggctcagggatgagtagaacaaatgtcagagtggtgcttacatacgtttcctaaagggtgaagtaggagtccaaatgtctaatttggatagtgtgtatgtatatagaggtattttaagggattaatatataaacctgattttatcaattgtattttcaagtaatctaaaataatttcttataacttatatgaagcaacctctaccacatatggtttagtgtgccctataatcagaacatagagttagtgaaagatttaaatactacttttgagaactcaaaaacttggaaacatatgataaatgacccaggaagccagtaatccttcaaggtatgtattacttctatttatttaccttttacatgggctttgctttaacatgtgtttttaaagagacagtagcatgtgacccttttaacctaataccaaagcaggtaacaagttccaagattcagtgctaagtgtagagactaaaagttattaaagcaacatttaaaaatgccaggatggtgaattaatttggaagaaaaatgagacagaagtaatatattcttggaggacactctagtcagagaaatcaaccagggaccagttgtcaagacatgcttaaataacctttaagagtagcactgatcctgctgtgcttagacagccatatccaggtagtgtctttgacctcctactgcctgctgtctcacatctgcccttccatcaccccagggcccatgaaagtcaaatctggactgcctgctgtacagctcaggaccacaggaagcaaaaataaacctgagtgggaaacttcctgacactttcagactctgtgctgacatttcatgcagaaagcctagaacatttaatcttcctccagtttaaaaatgggacagcctggtcttcgaagtgtcatacagttcatttccatctgcaggaaagctgctttcccagaatgcatccgtgacaccccatagcagaaaatagtaatctgaaactcacaactaaaggctatgcctggaaaccataccacaccatacgacacacccccccgcccccctccacacacacagagtaagaaaggcttaatcttaaaataaaggacagtcctttctgctcattgagttcactatgtgaaaagcacactcctgtgtccccctttttctccacttactgttaactggtaaaagaaaaatttctcatgagctaggacatgtccatagccagtgatctggaaaagcattagaagtttctggtccccaaacaactactactgtttagggtatcatctcccaggaccttcttcacctggccaagagatggagaaagtattctgggcaaaagaatcactacactcctggctctaccctgaaaatctgttcttcacttaactgagcatataatttatcctcacacctacagatagacaatccacttctcatcttgagcataggcatgtagctggcactttgccagttttaggtgcaatacaatcaatgcttagaaaatgagaagccctagagaaagttctagaagttggatggccctattaactaatggtcagttgctgggatttcccaccaagcaatgtcccctcacctccagagccccagggtagagaaaactagcagtcacctaggtatgcaaggagagccctggcctgggttctcacaggagaacacagctgtgattctcctttctccacacagggttgcatggtggacagggactgacatgggttctgggagaaggtagcagtcttcctcctgaagatgcctccaagagttccctccctttcctctacagcctttcaagcccagggatgcagaattccaaaggccacctcacactgtatctcttgagaaataagtagaaattacataagtttaagagtgtgtggggtgggggagggtgtgtgttgatgagattctatctatctacgtaggggtcagagcagggggtatgcttacattacaaaatgaagttaagttgtgtacctaagaaggctctgccgtgccctaggaaactacgtttacagcttctagcacacacttggttgctttctgtgcaattctatattctgcctggactcttagaagcactagaaaaatgagtgagagaccttgaaatgttcagccctaaaagggatgtctccatcacatcccttctctcagggctcagggaatcctgcagacaacgatgtgggaagaatatgagagctacagaggacaccaaggaaacaaggctttcaaaacacaacagggccaaagcacctatgaactcacggactgaggccgtatacacagggcttgcatgggtctgcaccagatggggtcctagggctgaaaatggacacacgccccgtccctaacccaaattctatctccaaccaaaaaccacttgcaaatgaaatttgccccaagggggtctcactgaagtaacaaactactcttaagggactgactgtgtgccgagcagtaaaaggccaacagaacacaaactcagtggcatctttgaaggttccttggttgataatgctgtaatgacttttcctttcctcaacttttaaaatgttatcttccctctctcctcccaaccttggttctttgtgtgtctattgtgccttctggttttgtatttttatacgatccctgagtgtgtaacaggctgctctctgtgatgacatctgtctcttgggctcttttgtttctgtttgttttgtactattccgatgtgtttatttttgttttattttattttgtctcatttttattcctttggagactgttcttttctaataagagacagaaagggggtagatccagaggagaggggaagtggggaggaactgggagaaaagagaaactgtaatcaagatataacttttaaaaaaatcttacttttcaattaaaaggggagttactattaattagtggtaagagtcatcacgtttctgtgtatgtttgttctctcccaaggccaggaggaattgtctttcactccttgagttaaccagggctgcacagtaaaggactgatgaatcacttggttatctggacctttttatactactggtcctagtgaggatggtcctccattggctgtcttcttccctaaagctttgagttgttgctcttcgtatgctttctggtccacaggaactaggcccttgaaaaatctacattccctcgcatctcctctctggtccctccccaggcttaataggctgccatccccatcaccctatcactccagctcatttgctttagctgtgcctagtgccctctaaggcctctgtttgaaagaatctaggccagtgttctttgcccccacatcagagggacagggaggaaagcacaggctgatgccccctcaaagattaagcctattatcgaggatgacgagagcagctgacagccaggcaaagtgggggatttgggtcatgaaagcacagtgaagaattcagatccctccatccactgagagaattaatgcagattaatagtaataggaataatggctgatgctatttgctaagtgcataaggtatgccaggcacagtgctcagagcttatgtaagttatctactctgcaacctgaaggaaaggctcatccatgttttatagataagaaaagtgaggtagagaagcattaagtataactagttgacagccatgggttagtaaacagtaagatgaaggtatttgcccgcagccaaacagctccatggccaattgtaattcactattttttttctgtctggactaaaaatgatctgagactctgatctggagcaggcccaacgtgctagaacaagaggttagtcaagcccctaaagccttagtttctggttccaaaggtaaggtatggatcatccctgagtgctgtggggctgatatgctagattaggaaggtcgggctctgtcctaactgctggagcagcctgcctccatcctgtatctcatcactcacagaagcttctactgaggatatctgcatatagcagtgtctacaaacaccatgttctcaaggctcgcagcccttcctgaagacgttttcccttgacttcccccagggaaaaaagctaaaagtgtttgcatcatagtggccacacatttgttttttagaaatatttttgtcatttaaattataagtaaggtttcttgcaagatactagtaaggatcgagtctcggccttttggctaagatcaagtgaagatactagtaaggagtccatgtccttagagtgaaacccttatttgtggctgatctcattatgatgcaggtgcttacaccttccaaacacaaaggaacagaagcctagtaagggaccatgggacactaaaatcagatctgtccctggctagctgtgtgacattgtgcaaggaattcttcatcttgaaccttaggcttcccatctgcccaacccttctcaaactgagcaaatatgagagatgaagatgtgccatggagtaagggtgctgcttccttccctgatgacctcctgcttctcccagctctatgcctcaccatgttatcgttctcccatgttgaaagaacaaatcacaaagctagcttggctttgaaatcttcaggaactccctactgtgtgagtgtgaccccctttgtttctacccctggactggagaggaaattgttttcagttctccccatgtttaatcttccagtgcatctagagaaaagctatgaaagaaaggaagaaagaaagaaatgagagaacagcttttcaatacgacgatatttttagtagtttgtattttcttttagtctttatcccatgagcgacacagcaacttatctctctgataagggacaatggatatttaaatataaagtatgtatggccacaatataaaaagagattttctcctgtgaatcctttgcattaagacagtccaaagcacttttgtcttccctgtcccattctccatgtcttcaaagccaagcagtagctgacttttgtagagaatggatactggagttcatgaaccgtttcgcatcttataacaaaggatttcctacaatgtacttgtcatttcaactccagcggaagctttaggaaggtttacgaattgttttgctaattagattttaaaattcccttcaatgtctctattgcaaatgtaaccaacttccccaagatttcagttatgccctgcagacagatcagccacagaggcagcaaggcacctccgagattaaagctcataagctagtccttggttatgaacttggacttgtaagacccgaagtcagtgtttaagataggctcaggatttttaacacccacctacaggattcctattcaaaggagttggagagagggccaaaaaggcagctgaggcatagggttgagttgaaccagagcaaacagcccctcttctagtgtgcacagcaaaagactttccacccattatgttgatgaaggaccctcccaatcactcagggccacaagctaatctccttttgacatacagacataagtgcaaaatctgaatataacacaagaagaagaaatggcagattagaatttcagccccttagtctagataagtattttctcttacatcttgcctagtcacaagatcccagctaaccataaacgtttctggggagcatagtcttcttgtgtccgtgaggaggaggaaccagacattgatattgaaattgaatgcaagtactctggacagagtggacacaaatcaggctacatggtgggggagtagatgttggtaagtagatgctggcgaagcctcctgagattaaagctcataagatgtacccttccatgggcttgagagctctgggtttgttttccaaactatgctgagtcttagtactcctgggacattagctcttactgttgcttcaatattccataactttataattttgttgttatccacattccaattagcttcttcagtgaatatgtataagctttgactatgaaatctgccattatgttctccttttaaaaagggtaaggaactggttgcttacaacccaaccctcttttagcaaagccaggctaggcagcatatgcagctggattcacaatcattgtgggactgaacaatttgggattggagaaggatggataacatagtggttgtttgtttgtttgtttgttttcattgagattctgtaccatgctgttcgtccttgtctctcttatttaattttaaagagtgttttgaatgcagagccttttctgtttcttatcttctcccctgctcccgagcaagccgtgagatagcatcattctctctaactgcattattttccaaaggctcagtaagaaaggaaggtttcctttattttattgagttgcctgttgaacaaggacaaccaaaccttactgagctgctatgacagttcatggttttggaaagagagctatttggaaagaaagctcggaactgtttggagtcagattggtgatctgagctagatccacttactcagttcatccagccctcagacacaaacaacataggtgcaagtgctgtagctagagataccaatacatatgaagcacttggcattgctccttggactcagaagcccttacaatgtcagtagtagaactacacatattgcactgttacctactgtagcatttattataataccattgcttacaacaccactatcatgggtattatttcaggctttagtgaaccagattatatttatggaaatagcatgctagagatacattttaccaaaacattatatgctcaggtatctagtttctagacactgcctgacttctcttcctcttgtcacatctctgcctttctctttctgcagtggtctcaggcagtgccaaccatggtagcaaactcaatgaatacattctctcctttattgacattggtgcttccagtggtgtcttaacttttcattatttttatgaattgcagtgccggtggcagatatcaaagcagtggtgacgggaaaggactgccctcatatgaaagagaaaggtgcccttaaacaaaacaaggtatggttttctaaatcactataaatacctctgcctatacactgcagtgagccagccttcgcgtatgcatgtattggatggttccccgtggtattttatgtcaggttgcacatctcagctcttctcttttcttctttcccaatccattccttccctgagtggtgcttttactctttctctgtcacttttctagtgcctgttccctcctgtcactctctgtctacttctaaccttagaaagtacaatggctgccctccctctgtctctgaatgagcctcctccacttatcttcatccattctgcaagcttcttctcgcctcttatgtatggtagttcctctccgtacatgctctcactgagtctcagtgaagcctgagacaggccgataccagcctcatgagtcaaaggatatgagaaaacactaagcacctgagccatcagagtcatagagagtagtctattaagtatccaaatgaggtttaaaggagggtaatacacaggagtacatgcctaggtgccatgaacaatgcagcttttctccccatccccttttagtttaccaacaagcttctatcatgatggtccacaatgttttctgagtaaacagggtggggatacaatcttgaaaaacagaaaattttctctgtttctaggtcagagggtccattaaggatccagttctttgcatatacccatggggatcttttgttctatgctacatcaacaaaacagtttcactatgtgtggtggtatacacctgaaaccctagcacaaaagaggaagaagcaagaaaacaaatcattagccagcctggactacacagcaaaatcctgtctcaaaaacaaaacaaaacaaagtctagatttacctggctgctctagatgccaaacgctgcatggatcgatcatttatttctttgattctaaaaacagtgtctaaaaggaatgaataataaaaaaaaatctatcctgcttatcaatcagcgttatccctgttttctgatttcaaatgaagataaaaggtcactgcatacaactatgctcaaagaaaacaaaaggtactgtgaaggcattgttcaagatgtcagaaggggaagataaaggcgaggatgctgagttacaagatccttgctgctgtgttatgtggatagaattcaactcaagttcatgttcgcttcttctttcgagcactggcctataagatgttccaatgaccagcataatactatgaagtaatgctagagagactagggctggggtaatctgttgcgtaacacctgtgggggtttccatgtcagaaagacaaggattgtattgtgcatagactccaacgagcattctaaactatggcaacaagtctgagatttcatggtttgcctcttatggtgctgacttccttccacagcagcagggactgccatatgtttcacatgtcaggtgttccatctgcagcctcggagagcacagactctgctcagcttcagaaaggttcttggttagataacacttgaactgagcaggaagccatgtgcagaaattgacaacacaagagtctaacccagagggctgggaaggatggctggcagtggagcagtctgccaggacttgaacatgctgactgggaactcggaattctgtaaaatatgttcagagaggcttcctacctcagcccagcacgtggaggtcttgagagctgtcattctcctccttagattaagatgctgaacaaagtggcaggtttagccagagaccttggggcagtaagtaaaatggaaaatgatctaggaagtcaccgaatgtcaactttgagcctgcagatacaggtgcatgagtgtacatacctgtacactcaaaacacatacatgtgaacccaaacatatgatcattcattcataccacatacacatatgcatgcaaggaaaaaaattttcttgctatagtaacataaattatcactctaaagacctcactatgtcactccatattactagtacattccaaagtaattagaggcatgcctcctcttaccctaaaaaggggtgaggtggggcaggctacagaaacaagacagccatcaggatcagggatctagttctctttagattgtgtaaattctttgcctattaccagaacgacagggatagagaactcgtcggattggaaagtaataactatgatgtaaaatgttttaggctacaatagaaaaagtcaacattatacaagaagtgttcaaatgaattggttctgacagaatagacatgataaggcctagaaacttagatcaaagtagaagcaagagtcatatcagagaaagcaaaggggaagataaaataaaaatttttaagtcatccacacgaaagccatgccacatgttcacagtagaaagagtgcattgcagtgggataagtggataagtggttaagcggagccaatgggagctgaattaaggagacaagaaggagcaatcgccacactcattaaaagggaaggcggaagggaaggggcagaagaagtaggtcatgttatcaacatgctcatgttgatctaaacatagcactgatcatgttcactataaacagtaagtacattaagagacaatcttaaaactgatctttatttaaaatgatcaaagtgtatttacttaatatacattgtaaagggtttagccaacttaatttaaaaaaagaaaacaaaaatatcaccacagctcgaaaaacaaactaaaaaagagaaagaaaagaaaagaaagaaaatttaaaaaaaaatcaccacaactcaagaaacggagatctgtacataaataaagaaaggatagaccatctcaggagtaactatgatgacacaggagcgaggctggacagatggggtcagtgcgcttagccatgggatgttccagagctcagcagcagaatgtgtgttcaaagggctgtgtggggttttcctagcaggttcttgacagagagtaaatgctcctgaccttatacggggcagaccacttaaccttggggatgtccacactggagtgctgtcagggtctggggaacactggatagctgtaaaggtagcaactgtggaattgtagagagtttatatctcagatcttcatagctctatggatgtgcctatccatttggaaaggctgtcggattcagaagcacagatatttgtcaatcgccagacattctggggctcatcagctcctgctccagcctcttgcccatagggccccaggtggcacctcatttgtagatgctggaagtggctgggtagcgattcggcaaagctgttactgagctgttgggctggcaacaggaacatggagaaggcacagcaactacaaattgattttcattaaattaaactatatgatgtctgtaagaaacctaattccagtgtaactttaaagtattggatgggaaaatacaccatactgattctaatcataagaaagctgagctaactctatcaaccttatacagatcagatctcagaagagagaaaattatcaaggagctattttccccaaagacacaataaccttaccttacacacatgcgcacttaacaagaagcatcaaaatacacgagtccagaaactgacagagcaaaagggacctcagcaaccaatagagatcaagcaaaggccaatcaaatggattgattggtgctatgaacaacaccatcaatcaacttgatttaattggcattaattgaatattctagccagcaggacaatactcattcttcttgagctcaccaaaaacaaacaaacaaacaaacattcaccaggttacgcattgagccactaaacatgcttgatttggtttcatcatgacaaaaataaaacgttatgttttttttccagaacaataatattacaaagcatattcttgggtcaccataaatttaaagtacaaaccaatagcccccccccaaaaaaggaaaccaaaaatgtaaatatttggaaatttaacaacacactttaaccaataatttaaagaagtcataagataaattttgtatctcaaaagtaaataaaattcaaaacacaatgtgtgctggatgcagtgaaagcatcatttgtaaggacatttacattaggtgcttagaagagaagcgtgctctgaaagcaatagtgtccctgtcatagagtactataaaaggcacgaagaatagaaattaaagataatgaaactgaaaacaagggaaaactcaagtgtaaaaggaaaaggggattaattcttttgtggcctggtgaaaggatagggaaaggaggagagagaaacccggtgtggagacgggatcgtgagaacacattacaagtgggtacttggccttcttctttcagactgcatgccacgcacttacaaattcacaaacaaattagcaaatattttctaaggtgctggtgttttcattattttcaggatgtcattaaaaaaattgaatagatggatggactatggaaagctgctgtagggtgaggtacacagatgggtgggtagggtacactgctgtaaatagataaacttgtctgtaagtcgaagctgcttccttgtgcttaccaggtgttccagacactcctgccatttccagcctaacgcagtgttccatcagcctggctctgtcatttgcatatacttgagaattatttgccttgtgatattattatccacagaccttatttttcaggcagtgtcaaaagcagaaaggaaagccacaattcttcctaacccacaactatttttccagtacccaaagacactgtcaccccctttgagacttatgggtaagaaaaggctatctgcagtttcaaggaagagttagccaaagtatgcccacagcaggaccacctctgtctggtgtccaaaagccaaggtatagtgttagctcttcagacagtttttgcagctatgaaacagcttctgagattttgtgcaacagaactctccatgaacaaatatgctgaacaaggccatcttaggtattagcatccagaaacaagagactttgttcatagcgacttagtcttgtagtgccagaggatggcaatataaagagagttgatccttcccttgaggtgcctactgcagagcacctgtctgtatatttagtcagtcagcattgaccttcacagatctgatgaggtctaacaaagaatggtgaccagggcagatgtggctcaacctcttggagttagaatagtggttcccatccttcctattgctgcgaacctttaatacagtttctcacgttgtggtgacccccaactatagaattatttttgttgctacttcataacagcaattttgctacttctctgtatcataatgttaatgtttttggagacagaggtttgccaaaggggttgagagccactgagctagagtctaaaacatttaacagaggttagtacaacaggaagatgtttatggaggcaagaagtatgaggtcgtttccagtagagttttatgacatttgaattatcacagggggataaaaattcaattttaaggaaactagggattgtaaattcacagtctttaattttgcaagtctttggtgtcttgtggtgtgctttagtctggattcttggtgcttatctccctagtcatggggcttgtagttaagcagccatcaaccatgaccaaaacatagacttcagttcttccgcgcgcccaactggccaggaagaacgacgctgcaacaggatccttctgcacacgtttattcagtcctgtttcttcttgtttatatctcccccgaaccctggacctctcactcttttatactctcagttcccatccacgcacagcaggccacgccacctcaccaggcacgcagcttaagctaatcagggcagcaggggcatatccccatcaaaatggattcaccggtatcctggtacacctgcgcagctctcaagatgtttgtggcttatatgaggaagtcaggtgcaagtcatatgacttagctgcagtccctggcgcctttgggactgccgccacacccactcctcacattcagtggatgctaggcgttcaaataggaatatatttcctggaagagaaactactgtgttttcatgctcagaaagaaacatattgtggctgttagtagctatctagggatcactgaggtcattctctggctcagacaaagaaatggacatcttgaaaagacagaaggccatgtatggaggacgagaaagtaactgctctatcccttcaggatgagcatagcctttgggagtccacaaaatgaatggaatttaaaaggggctgctgggtccccccttttcccttattggtcctactttgatatccacccccatgcagtttccccttgcagtgttttgtgacaagagccaccattacagggagcctgctttgctttccctggctccctatgtctctctgactgctccacagagcccagtttctgtcttgccaggataaccaagataagaagcagattctactagaccttgatgtatgagtttaaaagttctcattttaactaaatatcctgctatttgattgacttcattcatctttagttaattgagtgtattgaacatcgtctttgttgccaggtgctagaaatgcagattagtatggtccagccctagctctgggtgtccagtggtctaagatttatgtatgaacatagtcatatgttatctaccacataccttaaaaatgcaaataaaaacaaaggtaacgaaggcaaatctgagtctagtcaggagaaaatggcagttgagctgggctttaaaatgacattccccaggtagtgagcaggcaagcttccaggtaaagggcacatgaagagacccaggtgcacttcctcatgggaaagtgtcccatgcatgactagacaggaacaagggaagtcactggtttgagaactgtccagctgttccgataaacttgagccagaacctttgtgaaaagggcaatcgctgtgttaaacgagtaagagacagcttttcttcttttaacatagaaactcaagttcataggtacgtaaattaatagctttggaatctactactatgtctatggtcatatttaacatctacacctatgaaactatttcatgtatctcatgaaaacacttactcttcacgtgactggctagctggagaccccacatagttcaatgtgctctggggaaaatggccaatgtgttgttactcaaagcaatatgaaaaatgacagccaacactgtatactaaagatatgttgtgtaaatatatatttctattctcattgtcagtccatcgtttacctatgaaaaaatgaatattcaaatgcctccttatgctgaggcgctgcttctctgagtatctgcgattctgcatgtcttctcaccgatcccagagctacaggacagactgtgagattaggagttcagaggcctcagcaggtggggggttgttcagcttctcttgtcccttctctctcctcatcaaggcccatgcacagccttcctggacaaggcaaagaagtcctgtacctcagtggaacagggcagagatgagctgctaggagatctagcttttcacataaatccggaaggaacagaagacctttcacagtgagcaacaaagccccgaggtattagatacctgtgagtggtgtgtgtgtgtgtgtgtgtgtgtgttaggaggctcagagggggacactgcccaaaatcagtgtcagcctgttcggctgccacctggagcccatcttccttatgggagtttggacaggtggcagtttctggagagttcgcctgggaggtactgttgcttccagctctgcctcctcccttcttaaagtggtgggaagccagtcgaccttcagcaaatgactcagtgacagcaacccagggatgtcaataaaacccattaaaaatgatagcaccctttcatgcaggcatgcagctccgagaatgagttcctcccaccctcccaggcagccctgggaagattagagtgggaattgacattctcacaaatttcccatttcctgcctgtgtttatcaggaatctaggtcacgacagctcagatccttcatgtcctgagaaatgtatgcccaaagagggcaaagcccaaggtcattgtgcttcttcctgtgtgccttctggctctctgcaaaagagaaaacgtctcagctccaacatcctggttgccagtggcttctgtaccaactgaagggcatgcgtcctggctgtgtgctattcacaccagctgttggcacagttgttgcacaggtttgggcagaaagacctcggtgaaatgcacctcttcctggttattttccaaaggacctccttgaagctagagtttcaagcaaagcaaagccacccctccttttcctccagtctctcaagtatgagtcagagtcctgccaatgaccgactatcagatcaataaagagaaagtcatttctataagagttctaatccagaacaattttatcagaaacataccttaagaggacataatgacccatagtcggagcattcaatggtcattttcttttcacaagctcactgccaatcactgtctacaggctgcattatcacaacttggatcaataggcacatttcttctggtttttcttttcatttagcattagactctccttcataattatctcaccatttgtgatttccttaatactcaaaggagcaggagagatttaatttctcataacgttcctacaagtaataatatgtaactttgcttgctttgggatctttttttaaatactcccaggagtggaattcatggttgctgatatgtgggggggttttattgatttttttttaaagatgacatcaatttatggtaccactgctataactatcatcgtttcgattataaatttaaaggccttgagatagtgttgtggaaacagatgccaaactcaatgcaaaatgtgcttgcttgcttgcttgcttacttgcgtgattgttgcataacttcactgaagcctgaatggagggctgagggagaaagtgaataagaaatggagagaggagtttatgcaggcaagcatccatgactcagcatcctttccttccagggtttctatttctggtggagtaaggggcccctttgagtgtgagatacatgactgtctaggttttgtgcaaagctgccccctcctagagagaggacaactggaggtgaaccagacagagaaccccatgagagcccaagtatcttgatggtaggctgtgttccgagtggctccagacaacacacggtctttgggatttattttggaagaattctttaattcatctgaactcttcattctgaggcattgtgatatgagtcacttgccaaaggcaaatgctctcatagatagtgaataggaaatgatccagagaggtctggctttctttgcggtcagcttctcaaaagtgctactcccagatcctaacagggcagaggctgagatcagaggcacctaacagagttgaagggacatgtgttagagcacacattatcacagtcagaatgctgctattaaaacacttggttcttccctccagatcaagagccaacagggttctgatgtgggctattggctattaccttccagtcaggagccagtggggttctgatgtgggctattggctattaccttccaggagatccattctgctgacttctccaaccagtagggtgattatggttccccaatatgggtacggcacaagctctgagcagtgttttatggcctatgtattagacatggccctaggtgtgtcagccaaatttatccagccacaatgcagtgaaagtgtcctttagcccttggcactgtaggtccggctcatcgtctgcactcagtaaattcacatcagtaatttaatgtcttctgaccctgacatccacacttctccttggtatcctatagcctcagtggatatgtcttggatgtgtatatcctttgtttggttcaaaaatagggtttactcagaagtcttattacctctgaggtagcgtctatatttaggagggtccatacctctatgggtttctgtctgctaggagtaactaaaaatgattacccttaacactgctaattaaaggctttactacctttctatcttcttggaagggagatacacagtgttggccatgtgccatcgagctcttaaaaccctgccccatgaaaaggcagtggtaacgcttgtgcctgtgttcgtatgaaagtgagatggctcgtgcaggcctgtgctgaatgcagaggaggactcacgctggcacccgggagcactgcacccctcattccttttgccagcttcatggctcctcctgttctccaaacagaagagaggccatgttccatgtttgagctcacccaccagctttgttttctgtgatggttctttgttctctcctaggaggtgcttgaacttgctttctccatcttatacgactcaaattgccaactgaacttcattgctcctgataagcatgaggtaagaggtcttggtaagggttaattgatgagagaaaaataagtaaaattctagcatagaagaaacatcacttcttgtagaaacctgcctttgaaaatcatgaatagaagggtgtcttgttgacatggaaaccaccagctcaaacttcttagccgctgaatcagccccgtgcgtttgcccagctgtccttctgttaccataacaaaaagcccgcggtttgcatttgattcgggaatagcagtttacatttgacctctactttctgaggcttgaggctgtggtcagttgctttagattgggtgtcaggtgcacatgaaggaggaaactgcttgcttcatggcagcaatgaggcagagagaaagacagggccaatgtcccaatttccctcttcaggaatttaccatccaaagtcctaactcttcccactgagctcacctcctgaaatgtccagcgtctcccaatatttttcctttaacacagcatttgggggatattcaaagtctagactgtagaatggtcttaaagaaaactgactcaggatcagctctggctttgatgtgtactgaatatttaatttttgctctagaccctctccagataaactaatgtctctgttcgtgggaccatctgatgaagtagcttctatacgaagtctcttttcgctattttaagaggtctagggctgtctctgctgttggaattttatttccaagatgctttcattccgttttgacatcttgttatatgtataatttgttcttcttcttgaagcacactgtcagctatatttaaaatatttagcataagtctaagaaaatgcatttgtaaaataaagtagcagttaccattgatttaactttttcgcttgtaaattagacccccccacacaccatgcttgaaactttatttttagataataccattcaaatttttgttttgcatgtaactgcacaaacagcatttagaaggacaggaacattttaatagaatctgacttttgttctcatctccccgaggagattgagttcatttaaaaggtatttagtgtctggttttctctggtttgaaggttttgaataaaattatccatcccaaagaaagaggaaagattagacacaaatcctgcatttagaatggtacttaaatataattctgtgtcacttgacatttagtttgcagaagggtaagactttgtcttcatctttctgaaaatagatgccatatcttcctatttctgtttttaaataaagttgtagttatgaacaggccaacatatccaagatatagaagagacatagaaaacaaccaaaaatagaagttgggctgttacttaagtcagtgccaagctattttccccagtgtgtgcattaattccagataaggataaatgctctacgactgccaagcttttttttttttaacatagctgccacttcttatagactctatatgcttataagaactttcaattccttcaagacacttgcatatctagtatcactttattttcataattgctgcatgaaatagaaggttctttttacagataatctcatttatccaggaaggaaagaggcctcccaaaactgaatacgtgacaatggaaaggataataatagggtctgggagtgtagcttggtgggcaaagcctttgctgtccaaaggtaaggacctgagctgtgataaccagaactcatgcaagagccaggtaccataactagcatggttagtatcccagcacatctgcagtgtggtgagaagagaagaattcccagaagtttataggccagctagcctggcattcacagcaatgaacaacaaagagaccctgtcttaaacaaggaccaaggcaaggaccaacgctttccaccctgtggtacacacatgcacatgtgtttgtgtgtacatgtgcacatacatacttacacacacacacacacacacacacacacacacaggataaactacttcagagaccacctggattctttggtctttatcagttctgtcaatggcaacttgagttctctctggaaacctttctcacttcctattctgtgatgaagtcattgtctttcactcttctgacactttcttctctctgaccttaaaggcccttggaattacactgggtcacctagataatctaaactaatctctctctgttatagtcaactgacatcagccttaattttttcacacaacttaagttcttccctaggtcctgtgagcagatatctttgaaaggcgagttttctgtctaccccaagctgcagcatcattgtagtatctctttcccaagagttcctggtagtcagaagtctcacctatttcaagtgcagcctttaagtagccccggtggtgttttctttttgttgctttgcctcttttgtaaaggttagtgtccacaaatgattgattgctgtctaaactctggctccactagagtttgcaaaaggccttgtctcagtcattcccattttatttatgagtgagaggatgtaaagagaaccaggcctcaacaactgcttgtgttcctaaaattagaacacatgatggcgggacaaatacttgattccttcacaaattactaaaataacaagcatgtcctaaagaagataaagaaggtaagtttggtctttgaatatcattatgatgtcagaatttaaatatatttgtgtctttatatcttcttgctgttgtctttactagtatccaggttaccctatcctaaataatacaagcatcaccaagttatcttatgaatcctggtgacatggccctatgtctttaatgtctttctggctttctggctttctggctggataacatagtccagattccccttgtatgtttcctgctttttttttttttttttctatcaagcctacttacttttaataggaattttagtaattagcaaacagaatcttggtaaaaagataaaattatcacaattcagctataattttatataatcttcacaaaacagctaaaagcgagattttactgtaaaatatatcgtgaattagtgttgagaatttcaactcaaatttagtagtacacgatttttgtttataggtcaatgtaattgttgatgaaaaggtcgccgcctgctgtttctcaaaagcactattgctgtaggttaatctgtaccaggaaggtagccaaggctgggaagtctttgttcaaaggacaatagtcctaggacttagggatcactgtgacatgcgaccagagctgtgaaggcctttgggaacacagcactcagtggcacccatacctggctgtttgtcagaacgaactgggaagcttttgtaaataaagtctcctacctctgaccaacaaaatccgtaatctccagccaaggacttaggtatctatttctgtctgtttctgtgagcagatgtggtcaaaatgtctgagatattcatgagcgtacttgtgcttcgagaaatgttttaacagtgcatttgagttttgatgggctgtaggctttggctgagatcacacagctgaggtagaaagaaatccttacagattaatgctgctctaatcaggcatagctcacaccagtgcctttggcatgcaccgtggaagacttccatagagtcacagtggttgttggtatcaattgcttctgctgaaatctcccatcacatcgtgggacacgccctaggtagccagacatgtggttcgtaagctcattgggacctggaattggagcttgacccagagattacaggaaaagatggaatctagagcagatgttagaaggcattccaaaccagcaagaaacaaaacagttgtcagcatggaatcctaaatagggcagcttaacaggtgaataagcagcatccaatatgcaggccattttctgagatcttggctctttctccagctgctaatggttctcttttgaagttagagcagaactctactgtctgaagaggaatctgcaaagaacaatgtaggttttctgataaatggcatatggttccttctcccccaaagttcacagtcaactgaacagacaaagactattatttgttttataaagaaaacaaaaatgcttaataatgtagtccagtgtgttttccaaaagaaatgatggggtgatgtccccaggaatagattactagaagccctgggtattagagacctggacacaggaggttcaggcaggcagtcaacctacatcttcctaagataaccaatgatgttagccaatttagttatcaaacactgagcagctgaaggctattttctcagtcttattttgctaagaaagacaaaggccaccttggcttcatgatgcagctgagctgtcaatgtctatgcttaaatattagacatggtaagaaggtactaggtactaaacagggaactgtgttaaatatcaaggaagggaatgtttggcctgctgctaagcatagacattggaatacattctaccaacatcttaattagcaatatgagggaatccaattcttcatgttccatagggaaacactattgcacataagagcatgcttctagagtcaggttgcctgagtgcaaaacctacccactctcattttttcctacatcacttcatcctctgtgctttgattttcttaacttgaaaaacatatgataacagaagttcctgtttctgttaaatagaaggtacagagagggtgcgagtattagatgaataccaaagacttcccagcacatgctgggtactaagtgcctataattgctgtacctatgattatcatcaatgatgttcactgccacctcctctcccaccagtactgcatctggacagatgggctgaatgcactgcttgggaaggacatgatgagtgacctgacacgcaatgacctggacaccctgctgagcatggagatcaagcttcgcctgctggacctggaaaacatccagatcccggatgcacctccgcctatccccaaggaacctagcaactatgactttgtctatgactgtaactgaactggctgcacccagacgcattcctcccaaactggaagatctagctatcagcagagagcagagcaaacacatccacatgctgcaactgcccttgggtggaggggaagctgcagcttcctttggcctcatttttaaccctagcgccgcccccccccccatcttctctggcatctcaccttctacttcaatctatttcctgacgcagtgttttagatcctctaccattgctacagctcagcgatgggtcatgagcaaaagtcaccactagtaacagtcgaagagtcctctcattatatccagctatgggcatttccttcctcccttccttccttccttccttccttccttccttccttccttccttccttcattcttgcctggagtaggaaagccagttagccccaagctgccccatatttgctcaccaaaccaagagaaattcctaaggccagggttggataaaatagctctgctactggattagaagaccaaaggcctcctaccccttctctctagggtcacctcacaccatcagctctatgtgagttgagattgctttcacattgcctctctctccctttcctgccttggccttgctctggtccactttggtctcacttgtagcagcagcatcctcattgtagttgtctacagcatcaggtctcccaaactgtccacagagtccatgcctgttccttgtctgcactgtgaccatgaccaatccctctatcacactgtctagtcttgggcttcctctctttgccccagcccaggcctgccttcttcatttcttcgagctcccagcccttagcagaaagcacaaatgaagtcagtagtcctgctccatctctgataaactaaacctaaccgcccctaaggcggctgttgctatctaacagttccgtgtgaccttctctctggggctcctgctacagcccaggttttccagggtggtcaagctgtcagacatccaagtttacatcgttgtaattattataggtctttaaattttacaagggtttggggttattttgttttgttttgttggctttgtttttgtataaaagagtctaacattttttgccaaacagatatatatttaatgaagagatacataaatgtgtgtactttccagctttttttttaattattttaatcccaaacatcttcctgagagtaacactcccttaaacatgctgtggaataaaattaaatgtgaagagttggggagctggtgttttgatttagtaatgtgggcgcttgctactccagcatatccatcacctgggaatttgttagagatgcaaagcagacagcccctccagacttctgaaccacgatgtttgagtaggtgttcatttgggaagcaccgatcgtgagctctaaagcattgccgatatcatttctaggatgcacaccccaactcaccaaggaaatgagactcactgtacaaaaatatgatctattccttttatattgctgcttcctcggcatactttcccattattgtctccttaccatttcatgacttatagagccagtccaattaaagacactactgacaccaaggggacatgttgaaccacggaaaaagaatacaaacctacacacctgaaatcagttacgccaaagccaatcttactgtgaattaataagttcccaacagagcacaacagagatttcttcttaagtcagctcccctacaaatgtcatatggatcgtaagctctaagggctgggagggatgacagaaccccatgcagtgcagctaagccactctgaactggcagccaagatctagatacatgcaggtgactgctctttgtggctgtcaagatggtcaattacaggttggcctgggctccagtgacatggtccagagcactccataaattgcaaaatccatagtcattcacaggggtcattctttccactagagtgcccacatcggagtattaggctgacatttcctccatccttaagcttggatcttattaacatgcatgcccttcctgatggagtcatctactgttctacctgctgtgtgataagttagataaaaggaagtggatagaggcagagcacttttcacttcaaagtttaagagatgcacctcctggggcctggatgggaagaattcatctcctggtattcctactttggcccataaattagaaatttgtggggactttttttttctttttcatgtatatatataatacttgtgcacaagtgtgggacagcatagtgttttggtccatgttacactgggtagtgagaaagtctctctattgccatgaccatttatcatatctatatagtgaatacactggaaatcccctcttctagtgatctcgagatatacaatcttgtgaactgtatccacacactcctgcactgtaggaccccagaatgtagccctcctaactatcattgtacccactgtataccccatctgctctctccagcctccagtattgactccttattcagctacaggattccatggtgggtgttctgcttactgtcctggagaatatttcatttaataatgtcttccagtcccacccgaggtgttgaaagtgactgtattttatctttttatggctccataatagtccattgtgtacccacaccaccatttattttttcactcacctgttgctaggcactgaagtagatcccacatccccaggttttgtgaatactgctgcagtaaatatgagtacaggttcctcctggtgagcttttgtatggaagacacaccttttcatagactgacagcgtcttaaggacacgctctcattgttctgcatttcttttattttgtggcaaggtggggaaggatggttgcccatattcaacatctcacctatttcccaaggctgcttaagacatttcccacacacattgagacccgtgcctcaagttggatacttctggcgtcaactgtccaagccccatgtagtgcaaacaagaatcctgtttatcatgaagtccaagttctgttctccaatctggctttatctgaaataaaaaattgtatctgaatttgctgatattcaattccataatgatccccgcaactacttctaagagcagggaatgccgatggtaacttcaaccacaaaatgtagggttccagtccagtgcagtgagacttttgtccatgttcaaggtgaagcaacattggcagacatctctaattccagcacttaggaggcaggcaggctgatctgtatgagatcaagcttactctggtctacatagtgagtgccagcccagccagggctaaagagatgaggagctcacatctgtaatcccaccagaaggatttcacattcagggttagcctggaatacatagtgagaccctgtctccaaaagttaacaaaagcaaatactgtggtaatggaaaatgagggagtgaatggcagaaaatctatttagagcttagaaaatgtcctcaccatggaagaaaagaactttctaggtaaagcaaagagttaggaggaagggaacacttgtggccacccaagaacctgcaagcctctctgtggctggtggcatggagcaagaatgcagtgatgagtcggcaagggacttttacttgaggacaaaagaaaatgcattaggagtgttgttgtctgttttagcattcacatgaaataccacatagcagctatgtggggagaagattagagttggagaaattggaagctgacataacagcaaagatgttattgaaaatagtctcaagctggaaccttttggacccagactttcaaatctgcaattggaaaggggagggggatgaagtcatcaaagaggcagcacaagctggaaacagaaacttaattaagcagggactgagggagagaaagctcagaggacccctgggcttccggaataatgcatgagtaagcagataatagggctgggggcccatatctaaaatcaagaagaaaggcagaaagggagtgtttagggaagcataatgaaatgagataatgcaatagttgggtttagttggacttctctgaatggaaattaggatttgggggcaagtcacttagccattgtgagcctcttccttcactgataaaatgaaattcttatcaattgggagtatgaatgagatgtctgcagctgtcagtgctcaaaaagtagcccctccctccccccttccccacccttctcttcccactctccctctcttctgttattcataacagtctgagactgggatctttatcacagttgaagtaaatggcacattttgggcaatccaggaatctgcatttttctctgtggctggcagggaaggcacacacggagctctaacactgtagaagaagaaaggcagggagcaagaattcggtgacagagtcagcaagggacttttacttaaagacaaaagaaaatccattaggggtgtcactgtccattttagaattcagaaatatcgtaaagcgctatgtccgggaaagattggagtcaaagatattggaagcagacatagcagcacagatgttattgaaacagtccaaaacaagatctttttgggcacagactttcaaatctgcaattggaaagaggagaccctgttttataaggagagaggaaaaattagaaaaattaaaactcaacatagttaatggaacatctaagataaaacaaaatcacaatttaaaataagcccacaaaagagggtttgtatactatatgaaaatataattggaattaaaattttcatgtaattttatttcttctgagagtagctatatatgtaaaataatcacttcaagcccaacacttatttttaattcagaaaaatcatcaggatatactcagatgaaggagaaaaatgactacaatttttttaaaacctcccgatataaggatagttgcgtcactgagtaacaagcctaaatctggacttcctggaaacaggttgggatatactgctttcatgtttctaaacatcatactcataaggaaatgtccttctcccaaagttgggagaaggcaccacatatatactgtggcacatgtgcactcacaccacacacacatacactctcaacccgtccatccatacacagcacacacacacaacacacacatactcaacacatacatactcaacacatacaaagtcatacaaagtcaacacacacacacattcacaacacatgcacatatatacaacacacacaccacactcacaacatatacattcacataccaaacacatacactcacaccacatgtacacacacaacacacacacatagcacatacactctcacacctcacatgcactctcacaccatatatgcacacacacagagatgacacacacacgacatatacacacacaataataataacaattaatagttactaataaattaatttaagattcataaacgtttctatgtttgtggagaccaaataaggatgttgaatgtcctggaccaccatgcttcatcttattcctttgagataggctctctaattgaatgtgaattttggctgttgatggccattaagccctagagagcctcctgtcccctcctgaaccctgcagccttggggtttcaggcctgcgcaaccatgcacagttgtttcttttaagtggctctgggatctgaactgcggtcctcatgattgtacagcaagcactcttattcactaagccaactctccaagccattgaaattcaatgctcagaaagggtgtagatccagatggcgagggaggtgaggaggaactgagaggagtagggggaagaggaagtcacaatcaatacatattgcatacaaaaaggtctactttcagtcaaagaaaaaataaaaacacaacaaaacagaaaaataaaatcctgtgccaataggctaccctctccctctgcgttcactcatcctgcaccttgctgcttccagggcctcaggcctcagctgacttaccaccatggctggcacagacttagctccccttgagttctactggcctcagctgggctgtctttttcctcgtcttaccctgtctgaccaatcagcttctcctgtcacctatgggcagctgcatccctatttacaccccgaatttgtctctcctggattttcttaaatctttaactagtaaagaggacttctgccaatatgggtaattatttttaatagactcctagtcaacatcaatttaaactaccaaccagattgaaaaaaaaaatcatctttaagtcagcctttgcaagacccatggtatcccaaactcaaacacccattaaaatgtcccatttattacagactaaggacacagatgtaaggaaaaattcattacttcagtaactttcattgaccaaagcccttaagggcacacagcaacctttaagttgatgattttgggaacagggagaatcaattttcttaaagagtgtgtggtccttggtaggtcagccatggacttgataggttatataaaagaaaaaaaaaaaaggatgtggagtcaagactggggtgtgagtgagttgggaaggagtgggaaggtgaatataatcaaaataaattccatgaaattctcaaatagccaagaaaattttgctttaaatttgtacaattctttttaaacatcgaaatgtttaacaattatagcatatttattactttcaatagatgatgtttaacatagagtaaatattcagttaaataatacatactaaaaactttcagttaggcctttctgatgcccaaagacaagcccatgtccactttgagggtcctgtgaatttgaaaataaaattctattccttcttgctagaataaattaaaatctggttttccgtatccaaatcttatccccatcttcacatgggaagtgccatagtgtcatgtgaagaacagacgtgtcaggagttggacgtgacctggaaaaccaggatcagtggtgcaacctgcagagataaagctaaatatggaagctaagtcactgtgcaaaagctgaacaggatcagaaaagacagtgcagacagtggctacaagggactctatctactgccaaaaatagttgtaaaatctccacagcttgctttgttggacatgagattgtgatggacactggcctctgtctgtcattagttctagcaactactgttcactggctgcccggtacaaagcacactgctctatgcttgtctttcctgaaagtggtggccctctctttatagtttacctttttatggcttcggctacctgagccaactgtaataagtgtaaaaatgcatgcaatttcttctgcatagcatgacaaaattgcacatcattcctcatcactgacccttctttgttcttttgtttagcacaccaatgctgtaaatgccatcccttctgtcaggcagcaagctcctgcaaattcccaactcatctcctcctggttcttccatttgttctgtccctcttgggtagcttctctacatcttctccattctcttcaggatcattgtagcctatgaacactggagggatgctttcttagagagttagattaaaatatatatgctcaaccattaagaacatatgctgcttttgtagactacctgtgtcaggtggctcacactgcctgtgactccagctccaggggtttctgatacctcggcatcttcatgcacctgaattcatcccacccatacatacccacacacatatacagataattaaaaataaaacaactcataggtgattggtagatgaatgaatagattagatagataaacggtaggtacatgataggtgactgatatagatgatagataaatgattgatagatagatcaatgtaaatgagtaaatatagaagttagaattacaaaatcactctatattataaagaatatagagttcttaagtgctctgctacattttccccattgcaaactagcaattcttttccaggtgagaacaatctttctcaggactgtttctcaggaaatctcagaatttccatatgttaccgtgacaaaatgccaaggaaaagggcacacgcacctggggtggaagcagacttcagactcagccgcacgtgctgctgggtgggttgcattgctgctgtgagttggtcatccattcgtggggctctccaggagcccatggttgactgacttggcctgtctgaagaggaaaacaatgtcatatcagtcccctaccctgtctcacagccatctatcctggcacctactgtgagtgtaaagagaagaaatgaatagtcaaacatgcagtttcatttggcccaagttatttcagcatctgtaaagcaagaattcatctatcacaaataaagtcattatcgaagcagctgttacccagacgtgactcccagctgggcagataggagagcaatttatctctgagcggcagcttgctagcatccaacctgccacctttgaagaggattcttcagaacataagatccaagaagatacagatgaaatgtctctttaattcttttcaaaataataccaattgcatcttactgtgtataaaaaccttaaaaattggagaatctaaaaacatattcctagagaagaattacttgaaatcaagataataactatcatgaataatttaatatattccccatcctgtcacataaggttgagactatagactatatctatatgtgtttgtgtcaccaactaaaatccatcacctggagaaggtaagtcacacaactgtcttgtttaaccagttgtcctagggttacgacagtgatgctagtggtctccttccacacctctttacacgaggccatgtacaaggaccttctgaaaactccctgacagatctgaagactcaccttcgcatgcaaagagtctcaattttcaaagttccgcatcaacacatgggaagaatagcaaaattagcaaagcctatgtgttacatgagagaaaactgaatgaaagacttcgagtccaaaggaactgtgctgatgcagggtgaggcagcgctctttgatggttcctgactgtccacttgacacatataaaatcacctgggaagggagtctcagggaggcattgttcaggttaggctgtgggcgggcttgttcctctctcctctccaccacagatataatgtgacaagtcctctcaagtccctgtcacaacggcccccttgccatgatgtctgcaatatggagctatgagccaagtaaactttgatttctcaagctgcttctgtctgggcgtttcatcacagggacaaaagagaagatgagacacttggtaattaatttgtgctcactgcaatccatttaaatatttctccacaatcttctttaaaaaaaatatttctttaagaactgaagataaactcaacaggatggtgcatgcctgcaatcccattagttgagaaagcggaagcagtagaaatggtgatgttgaagctatcctgcattgtctcaaaaacaataaaaaacaaacaaaacaaaacaaaacaagacagggaaatatagaacgcataccccttacttcagggaatgtgggaattacagtatttatcctctgcaggaaaaattgtccagcttcatcactgttgataattgtgaacaggtggcagacaggtgaaatgctgacgtggaaggtgactactaccctgaggatgtttgacagcattcaggctctctacccactgtgccaatagtgtcagcccctcatcccctcgttgtgataattaaatggctcccaatattgccagttgtccctggggaggcaaaaatcactccaagttgagaaccattaaaccacacaggcaagccatgccagtcacaggtgcttcagtggaaactttaaggtgctagagttcatagatacagctgtgtctgggtctaaaaaggcaggctatccagatggagaataacttataacttagttctcttgacaacctgagaaggtcagccttgttccttttcgttaatggtggaaaacctgatgctcagagaaagtgagttccggtccagatccatcacatagcaggtaaatatgagtcccctccttcgcaacggtgtatccatccagaaagatactgccaaagggtaggaacaactcacaaatgctagatgtatacaacctgtaacacagagcaggaggagatgggtttaaatggaggcaggctaatccgacaccaaaaacttaatgcttccacagataagattttatccacattttgaaacccttcagtgtgtttagaattacactgtcagcaaaattgtcattggagtattttgcgtactgattgggttccgcaattaagtcttccttgatgaaagcgcattagggctaattttaaatctgattgctgtcagcaaggcatccacttgaagctgctttcacataagcaccagtgattttttttcccccccaggaatgccagcatcagagcttactgcctgaagtctctgtagacgcattgccattcccaccttggtaaaaccccctcagaactgtcagttcacagtgtgttaagctcaaaatgccttgatgcacggaaagcaccagtgcgtctccagagcccagaaatactgtgcatcttagtgtgggcctgaatcaagatagcaacagaagattgagcgtctaatcagattactgagacaaaaggctcccgggccatggcccgaggtcccttgactggaatcctcctgtattaataaaaataatatatggcttgctctgctccattgtggagggacaaagccagagaggaactggcatggattattaagtagcctcttggccctaaagctttctactctgtctcagatctgtcagtctttctttgaataaaacatgtgttaaccaagacagaatttgtgaagtgtgatctctgtagaccgtgtcagctagtaaaaagggatggccagttcccttctactgtctaaaatgagattatgctccagtgactgtgcaaagtcatgtcaagtaggacagtacagagtatgcccagggatgtaggccccaccccttaaaggttctaccatctcagtaccaccacagagaaagttcccacataggggactttggagacaaaccaaatccaagccgtgaaatagcctaaggggaaacagcaagccagccttacagttggatgcttggcagcacaggaagcagagagcatgggaggaagctcccagtttgggttttatattgaaggctcgctcacctttaagt

SEQ ID NO: 1579 - DNA, 2518 bp, Mus musculus
tgaatgtgaactatctcccgctccttctcggtcctcttctttccctcgctttcttcagtccctcataggaaaaagtagaggtatcgaggagaactaagagagggagctctttgtgtcttgacaaagattgtgagaaattaaattgcaaaggatcctttaccttgtgatactaccagatcagagaaaagctcttcccagaaaagccgatgatctctgaagatgctaaataaatgagcaggagtttccctgaaatggaagctccctttgattggctgatcttcccacaactcctgccaatcggagcacccctgggcttcagctccataaacataagcaaagctccatgcttattcttctggacttggagcgtattccattcgaaggtgtgcagcgggtctctgttcacatggctcaactggaaacctgtttcctgagcaagcttactgggcagccctctggtcttccggcacactgtcctactggggcacgactctaagtcatatttgtggcagcagcttagacgcagtatatgtcgttggggatgatggacttacggaagcttggtaatgcaggtggtgaaggagcaggttatgagagcgcttacaaccaagcctagttccctggaccagttcaaaagcaagctgcaaaacctgagctacaccgagatcctgaaaatccgccagtctgagaggatgaaccaggaagatttccagtctcgcccgattttggaactaaaggagaagatccagccagaaatcttagagctgattaaacagcagcgcctgaaccgccttgtggaagggacctgctttaggaaactcaatgctcgccggagacaagacaagttttggtattgtcggctttcaccaaatcacaaggtcttacattatggcgacttggaagagagcccccaaggagaagtgccccacgattccctgcaggacaaattgccggtggcagatatcaaagcagtggtgacgggaaaggactgccctcatatgaaagagaaaggtgcccttaaacaaaacaaggaggtgcttgaacttgctttctccatcttatacgactcaaattgccaactgaacttcattgctcctgataagcatgagtactgcatctggacagatgggctgaatgcactgcttgggaaggacatgatgagtgacctgacacgcaatgacctggacaccctgctgagcatggagatcaagcttcgcctgctggacctggaaaacatccagatcccggatgcacctccgcctatccccaaggaacctagcaactatgactttgtctatgactgtaactgaactggctgcacccagacgcattcctcccaaactggaagatctagctatcagcagagagcagagcaaacacatccacatgctgcaactgcccttgggtggaggggaagctgcagcttcctttggcctcatttttaaccctagcgccgcccccccccccatcttctctggcatctcaccttctacttcaatctatttcctgacgcagtgttttagatcctctaccattgctacagctcagcgatgggtcatgagcaaaagtcaccactagtaacagtcgaagagtcctctcattatatccagctatgggcatttccttcctcccttccttccttccttccttccttccttccttccttccttccttccttcattcttgcctggagtaggaaagccagttagccccaagctgccccatatttgctcaccaaaccaagagaaattcctaaggccagggttggataaaatagctctgctactggattagaagaccaaaggcctcctaccccttctctctagggtcacctcacaccatcagctctatgtgagttgagattgctttcacattgcctctctctccctttcctgccttggccttgctctggtccactttggtctcacttgtagcagcagcatcctcattgtagttgtctacagcatcaggtctcccaaactgtccacagagtccatgcctgttccttgtctgcactgtgaccatgaccaatccctctatcacactgtctagtcttgggcttcctctctttgccccagcccaggcctgccttcttcatttcttcgagctcccagcccttagcagaaagcacaaatgaagtcagtagtcctgctccatctctgataaactaaacctaaccgcccctaaggcggctgttgctatctaacagttccgtgtgaccttctctctggggctcctgctacagcccaggttttccagggtggtcaagctgtcagacatccaagtttacatcgttgtaattattataggtctttaaattttacaagggtttggggttattttgttttgttttgttggctttgtttttgtataaaagagtctaacattttttgccaaacagatatatatttaatgaagagatacataaatgtgtgtactttccagctttttttttaattattttaatcccaaacatcttcctgagagtaacactcccttaaacatgctgtggaataaa

SEQ ID NO: 1580 - protein, 246 aa, Mus musculus
WTYGSLVMQVVKEQVMRALTTKPSSLDQFKSKLQNLSYTEILKIRQSMNQEDFQSRPILKEKIQPEILIKQQRLNRLVEGTCFRKLNARRRQDKFWYCRLSPNHKVLHYGDLEESPQGEVPHDSLQDKLPVADIKAVVTGKDCPHMKEKGALKQNKEVLELAFSILYDSNCQLNFIAPDKHEYCIWTDQALLGKDMMSDLTRNDLDTLLSMEIKLRLLDLENIQIPDAPPPIPKEPSNYDFVYDCN

SEQ ID NO: 1581 - DNA, 3899 bp, Mus musculus
gatgaagtgtgcatactgtgtgacatttccctctttttaagtaggggactccaaaaaagtcgtgggcacccagtcctaggcactgtgcaggggggcgggcagcagtgcgggggcgggcagcaaacgcgccaacaaacgcgtgtccgcgcgcaggtgccgggggcggcggcggcaactccgcatcggctgcccagagttcgcggcagctcgcgggatgctcctagatgcaagatgtgtctctggccagcaggaggaaggaagaggaagtgagagcagcggcagcaggcggcagcggccggcgacccgagtctaagtgcgtgcgttcgggcagcggcagcgggctaggatgggcacgagatagaggcagagccaccgccgtccgcgcctccgagagcggcgacagagcctcgggcaccggtctacgtctcctgccccggcgctccggcctctgggaaccctcgttgcggcgtcctgagaccccgggcagtcacacaatgccgccgccttcggacatcgtgaaggtggccatagaatggcctggcgcctaccctaaactcatggagattgaccagaaaaagccactgtctgccattataaaggaagtctgtgatgggtggtctcttgccaaccatgaatattttgcactgcagcacgctgatagttcaaacttctacatcacagaaaagaatcgcaacgaaataaaaaatggcacgatccttcgattaaccacatctccagctcagaatgcccagcagctccatgaacgaatacagtcatcaagtatggatgccaagttggaagccctgaaggacttggccagcctctcccgggatgttacctttgctcaggagttcataaacctggatggcatctcactcctcactcagatggtggaaagtggcactgaacgataccagaagttgcagaagattatgaagccctgctttggagacatgctgtccttcactctcacagcctttgtggagttgatggaccacggcattgtatcatgggatacattctcagtggctttcattaagaagatagccagctttgtgaacaagtctgccatagacatctcaatcctccagcggtccttggccattctggagtcaatggttctcaacagtcatgacctctaccaaaaggtagcccaggagatcaccattggccaactcattcctcatcttcaggggacagaccaagaaatacaaacttacaccattgctgtaatcaacgcacttttcctcaaagctcctgatgagaggagacaggagatggcgaatattttggctcagaagcagctgcgctacatcattttaacacatgtcatccgagcacagcgggccatcaacaatgagatggcacaccagttatatgttctccaagtgctgacctttaaccttctggaagacaggatgatgactaagatggacccccaggaccaggcccaaagggacatcatatttgaacttcgaagaattgctttcgatgcagagtcagaacctaataacagcagtggcagcatggagaaacgcaagtccatgtacactcgggattataaaaaacttggcttcattaatcacgtcaatcctgccatggacttcacacagacccctcctgggatgctggctctggacaacatgctgtatttcgctaagcaccaccaggatgcatacatccggatcgtgctagagaacagcagccgagaagataaacatgagtgccccttcggccgcagcagtatagagctgaccaagatgctgtgtgagatcctcaaagtgggcgagctgcctagtgagacctgcaacgactttcacccgatgttcttcacccatgacagatcttttgaggaattcttctgcatttgcattcaactcctgaacaaaacatggaaggaaatgagggcaacatctgaagacttcaacaaggtaatgcaggtggtgaaggagcaggttatgagagcgcttacaaccaagcctagttccctggaccagttcaaaagcaagctgcaaaacctgagctacaccgagatcctgaaaatccgccagtctgagaggatgaaccaggaagatttccagtctcgcccgattttggaactaaaggagaagatccagccagaaatcttagagctgattaaacagcagcgcctgaaccgccttgtggaagggacctgctttaggaaactcaatgctcgccggagacaagacaagttttggtattgtcggctttcaccaaatcacaaggtcttacattatggcgacttggaagagagcccccaaggagaagtgccccacgattccctgcaggacaaattgccggtggcagatatcaaagcagtggtgacgggaaaggactgccctcatatgaaagagaaaggtgcccttaaacaaaacaaggaggtgcttgaacttgctttctccatcttatacgactcaaattgccaactgaacttcattgctcctgataagcatgagtactgcatctggacagatgggctgaatgcactgcttgggaaggacatgatgagtgacctgacacgcaatgacctggacaccctgctgagcatggagatcaagcttcgcctgctggacctggaaaacatccagatcccggatgcacctccgcctatccccaaggaacctagcaactatgactttgtctatgactgtaactgaactggctgcacccagacgcattcctcccaaactggaagatctagctatcagcagagagcagagcaaacacatccacatgctgcaactgcccttgggtggaggggaagctgcagcttcctttggcctcatttttaaccctagcgccgcccccccccccatcttctctggcatctcaccttctacttcaatctatttcctgacgcagtgttttagatcctctaccattgctacagctcagcgatgggtcatgagcaaaagtcaccactagtaacagtcgaagagtcctctcattatatccagctatgggcatttccttcctcccttccttccttccttccttccttccttccttccttccttccttccttcattcttgcctggagtaggaaagccagttagccccaagctgccccatatttgctcaccaaaccaagagaaattcctaaggccagggttggataaaatagctctgctactggattagaagaccaaaggcctcctaccccttctctctagggtcacctcacaccatcagctctatgtgagttgagattgctttcacattgcctctctctccctttcctgccttggccttgctctggtccactttggtctcacttgtagcagcagcatcctcattgtagttgtctacagcatcaggtctcccaaactgtccacagagtccatgcctgttccttgtctgcactgtgaccatgaccaatccctctatcacactgtctagtcttgggcttcctctctttgccccagcccaggcctgccttcttcatttcttcgagctcccagcccttagcagaaagcacaaatgaagtcagtagtcctgctccatctctgataaactaaacctaaccgcccctaaggcggctgttgctatctaacagttccgtgtgaccttctctctggggctcctgctacagcccaggttttccagggtggtcaagctgtcagacatccaagtttacatcgttgtaattattataggtctttaaattttacaagggtttggggttattttgttttgttttgttggctttgtttttgtataaaagagtctaacattttttgccaaacagatatatatttaatgaagagatacataaatgtgtgtactttccagctttttttttaattattttaatcccaaacatcttcctgagagtaacactcccttaaacatgctgtggaataaaattaaatgtgaag

SEQ ID NO: 1582 - protein, 807 aa, Mus musculus
MQDVSLASRRKEEEVRAAAAGGSGRRPESKCVRSGSGSGLGWARDRGRATAVRASESGDRASGTGLRLLPRRSGLWEPSLRRPETPGSHTMPPPSDIVKVAIEWPGAYPKLMEIDQKKPLSAIIKEVCDGWSLANHEYFALQHADSSNFYITEKNRNEIKNGTILRLTTSPAQNAQQLHERIQSSSMDAKLEALKDLASLSRDVTFAQEFINLDGISLLTQMVESGTERYQKLQKIMKPCFGDMLSFTLTAFVELMDHGIVSWDTFSVAFIKKIASFVNKSAIDISILQRSLAISMVLNSHDLYQKVAQEITIGQLIPHLQGTDQEIQTYTIAVINALFLKAPDERRQEMANILAQKQLRYIILTHVIRAQRAINNEMAHQLYVLQVLTFNLLEDRMMTKMDPQDQAQRDIIFELRRIAFDAESEPNNSSGSMEKRKSMYTRDYKKLGFINHVNPAMDFTQTPPGMLALDNMLYFAKHHQDAYIRIVLENSSREDKHECPFGRSSIELTKMLCEILKVGELPSETCNDFHPMFFTHDRSFEEFFCICIQLLNKTWKEMRATSEDFNKVMQVVKEQVMRALTTKPSSLDQFKSKLQNLSYTEILKIRQSMNQEDFQSRPILKEKIQPEILIKQQRLNRLVEGTCFRKLNARRRQDKFWYCRLSPNHKVLHYGDLEESPQGEVPHDSLQDKLPVADIKAVVTGKDCPHMKEKGALKQNKEVLELAFSILYDSNCQLNFIAPDKHEYCIWTDQALLGKDMMSDLTRNDLDTLLSMEIKLRLLDLENIQIPDAPPPIPKEPSNYDFVYDCN

SEQ ID NO: 1583 - DNA, 3817 bp, Mus musculus
tttgatagtaacctgggccagttgcattttggcttgggggagcagcacaacagagtccgggacccagagcagagctgttaacctcttggcagccagaaaataggagggatggaggaaggaaaggaaggaggagggtcagaggaagcagcagcagcagctggagtctccacacacccttcaagagtgtgactccagggactccaccttcttccctaaggctgcacttcgtggctcttctatcaccttctggtcatgtcacaggttgacaacatgggcctggagggaacattcaagaaccaaatgatagtgatgtgttgtgtgtgtcatctgctcagatggtttagacacgtgtgccggtccacgcggtaggacccccgtttctacctgctttgtacttcctccagtcacacaatgccgccgccttcggacatcgtgaaggtggccatagaatggcctggcgcctaccctaaactcatggagattgaccagaaaaagccactgtctgccattataaaggaagtctgtgatgggtggtctcttgccaaccatgaatattttgcactgcagcacgctgatagttcaaacttctacatcacagaaaaggaatcgcaacgaaataaaaaatggcacgatccttcgattaaccacatctccagctcagaatgcccagcagctccatgaacgaatacagtcatcaagtatggatgccaagttggaagccctgaaggacttggccagcctctcccgggatgttacctttgctcaggagttcataaacctggatggcatctcactcctcactcagatggtggaaagtggcactgaacgataccagaagttgcagaagattatgaagccctgctttggagacatgctgtccttcactctcacagcctttgtggagttgatggaccacggcattgtatcatgggatacattctcagtggctttcattaagaagatagccagctttgtgaacaagtctgccatagacatctcaatcctccagcggtccttggccattctggagtcaatggttctcaacagtcatgacctctaccaaaaggtagcccaggagatcaccattggccaactcattcctcatcttcaggggacagaccaagaaatacaaacttacaccattgctgtaatcaacgcacttttcctcaaagctcctgatgagaggagacaggagatggcgaatattttggctcagaagcagctgcgctacatcattttaacacatgtcatccgagcacagcgggccatcaacaatgagatggcacaccagttatatgttctccaagtgctgacctttaaccttctggaagacaggatgatgactaagatggacccccaggaccaggcccaaagggacatcatatttgaacttcgaagaattgctttcgatgcagagtcagaacctaataacagcagtggcagcatggagaaacgcaagtccatgtacactcgggattataaaaaacttggcttcattaatcacgtcaatcctgccatggacttcacacagacccctcctgggatgctggctctggacaacatgctgtatttcgctaagcaccaccaggatgcatacatccggatcgtgctagagaacagcagccgagaagataaacatgagtgccccttcggccgcagcagtatagagctgaccaagatgctgtgtgagatcctcaaagtgggcgagctgcctagtgagacctgcaacgactttcacccgatgttcttcacccatgacagatcttttgaggaattcttctgcatttgcattcaactcctgaacaaaacatggaaggaaatgagggcaacatctgaagacttcaacaaggtaatgcaggtggtgaaggagcaggttatgagagcgcttacaaccaagcctagttccctggaccagttcaaaagcaagctgcaaaacctgagctacaccgagatcctgaaaatccgccagtctgagaggatgaaccaggaagatttccagtctcgcccgattttggaactaaaggagaagatccagccagaaatcttagagctgattaaacagcagcgcctgaaccgccttgtggaagggacctgctttaggaaactcaatgctcgccggagacaagacaagttttggtattgtcggctttcaccaaatcacaaggtcttacattatggcgacttggaagagagcccccaaggagaagtgccccacgattccctgcaggacaaattgccggtggcagatatcaaagcagtggtgacgggaaaggactgccctcatatgaaagagaaaggtgcccttaaacaaaacaaggaggtgcttgaacttgctttctccatcttatacgactcaaattgccaactgaacttcattgctcctgataagcatgagtactgcatctggacagatgggctgaatgcactgcttgggaaggacatgatgagtgacctgacacgcaatgacctggacaccctgctgagcatggagatcaagcttcgcctgctggacctggaaaacatccagatcccggatgcacctccgcctatccccaaggaacctagcaactatgactttgtctatgactgtaactgaactggctgcacccagacgcattcctcccaaactggaagatctagctatcagcagagagcagagcaaacacatccacatgctgcaactgcccttgggtggaggggaagctgcagcttcctttggcctcatttttaaccctagcgccgcccccccccccatcttctctggcatctcaccttctacttcaatctatttcctgacgcagtgttttagatcctctaccattgctacagctcagcgatgggtcatgagcaaaagtcaccactagtaacagtcgaagagtcctctcattatatccagctatgggcatttccttcctcccttccttccttccttccttccttccttccttccttccttccttccttcattcttgcctggagtaggaaagccagttagccccaagctgccccatatttgctcaccaaaccaagagaaattcctaaggccagggttggataaaatagctctgctactggattagaagaccaaaggcctcctaccccttctctctagggtcacctcacaccatcagctctatgtgagttgagattgctttcacattgcctctctctccctttcctgccttggccttgctctggtccactttggtctcacttgtagcagcagcatcctcattgtagttgtctacagcatcaggtctcccaaactgtccacagagtccatgcctgttccttgtctgcactgtgaccatgaccaatccctctatcacactgtctagtcttgggcttcctctctttgccccagcccaggcctgccttcttcatttcttcgagctcccagcccttagcagaaagcacaaatgaagtcagtagtcctgctccatctctgataaactaaacctaaccgcccctaaggcggctgttgctatctaacagttccgtgtgaccttctctctggggctcctgctacagcccaggttttccagggtggtcaagctgtcagacatccaagtttacatcgttgtaattattataggtctttaaattttacaagggtttggggttattttgttttgttttgttggctttgtttttgtataaaagagtctaacattttttgccaaacagatatatatttaatgaagagatacataaatgtgtgtactttccagctttttttttaattattttaatcccaaacatcttcctgagagtaacactcccttaaacatgctgtggaataaaattaaatgtgaag

SEQ ID NO: 1584 - protein, 679 aa, Mus musculus
MGGLLPTMNILHCSTLIVQTSTSQKRNRNEIKNGTILRLTTSPAQNAQQLHERIQSSSMDAKLEALKDLASLSRDVTFAQEFINLDGISLLTQMVESGTERYQKLQKIMKPCFGDMLSFTLTAFVELMDHGIVSWDTFSVAFIKKIASFVNKSAIDISILQRSLAISMVLNSHDLYQKVAQEITIGQLIPHLQGTDQEIQTYTIAVINALFLKAPDERRQEMANILAQKQLRYIILTHVIRAQRAINNEMAHQLYVLQVLTFNLLEDRMMTKMDPQDQAQRDIIFELRRIAFDAESEPNNSSGSMEKRKSMYTRDYKKLGFINHVNPAMDFTQTPPGMLALDNMLYFAKHHQDAYIRIVLENSSREDKHECPFGRSSIELTKMLCEILKVGELPSETCNDFHPMFFTHDRSFEEFFCICIQLLNKTWKEMRATSEDFNKVMQVVKEQVMRALTTKPSSLDQFKSKLQNLSYTEILKIRQSMNQEDFQSRPILKEKIQPEILIKQQRLNRLVEGTCFRKLNARRRQDKFWYCRLSPNHKVLHYGDLEESPQGEVPHDSLQDKLPVADIKAVVTGKDCPHMKEKGALKQNKEVLELAFSILYDSNCQLNFIAPDKHEYCIWTDQALLGKDMMSDLTRNDLDTLLSMEIKLRLLDLENIQIPDAPPPIPKEPSNYDFVYDCN

SEQ ID NO: 1585 - DNA, 2738 bp, Mus musculus
atagccagctttgtgaacaagtctgccatagacatctcaatcctccagcggtccttggccattctggagtcaatggttctcaacagtcatgacctctaccaaaaggtagcccaggagatcaccattggccaactcattcctcatcttcagggcatgtcatccgagcacagcgggccatcaacaatgagatggcacaccagttatatgttctccaagtgctgacctttaaccttctggaagacaggatgatgactaagatggacccccaggaccaggcccaaagggacatcatatttgaacttcgaagaattgctttcgatgcagagtcagaacctaataacagcagtggcagcatggagaaacgcaagtccatgtacactcgggattataaaaaacttggcttcattaatcacgtcaatcctgccatggacttcacacagacccctcctgggatgctggctctggacaacatgctgtatttcgctaagcaccaccaggatgcatacatccggatcgtgctagagaacagcagccgagaagataaacatgagtgccccttcggccgcagcagtatagagctgaccaagatgctgtgtgagatcctcaaagtgggcgagctgcctagtgagacctgcaacgactttcacccgatgttcttcacccatgacagatcttttgaggaattcttctgcatttgcattcaactcctgaacaaaacatggaaggaaatgagggcaacatctgaagacttcaacaaggtaacgggtgtggtaatgcaggtggtgaaggagcaggttatgagagcgcttacaaccaagcctagttccctggaccagttcaaaagcaagctgcaaaacctgagctacaccgagatcctgaaaatccgccagtctgagaggatgaaccaggaagatttccagtctcgcccgattttggaactaaaggagaagatccagccagaaatcttagagctgattaaacagcagcgcctgaaccgccttgtggaagggacctgctttaggaaactcaatgctcgccggagacaagacaagttttggtattgtcggctttcaccaaatcacaaggtcttacattatggcgacttggaagagagcccccaaggagaagtgccccacgattccctgcaggacaaattgccggtggcagatatcaaagcagtggtgacgggaaaggactgccctcatatgaaagagaaaggtgcccttaaacaaaacaaggaggtgcttgaacttgctttctccatcttatacgactcaaattgccaactgaacttcattgctcctgataagcatgagtactgcatctggacagatgggctgaatgcactgcttgggaaggacatgatgagtgacctgacacgcaatgacctggacaccctgctgagcatggagatcaagcttcgcctgctggacctggaaaacatccagatcccggatgcacctccgcctatccccaaggaacctagcaactatgactttgtctatgactgtaactgaactggctgcacccagacgcattcctcccaaactggaagatctagctatcagcagagagcagagcaaacacatccacatgctgcaactgcccttgggtggaggggaagctgcagcttcctttggcctcatttttaaccctagcgccgcccccccccccatcttctctggcatctcaccttctacttcaatctatttcctgacgcagtgttttagatcctctaccattgctacagctcagcgatgggtcatgagcaaaagtcaccactagtaacagtcgaagagtcctctcattatatccagctatgggcatttccttcctcccttccttccttccttccttccttccttccttccttccttccttccttcattcttgcctggagtaggaaagccagttagccccaagctgccccatatttgctcaccaaaccaagagaaattcctaaggccagggttggataaaatagctctgctactggattagaagaccaaaggcctcctaccccttctctctagggtcacctcacaccatcagctctatgtgagttgagattgctttcacattgcctctctctccctttcctgccttggccttgctctggtccactttggtctcacttgtagcagcagcatcctcattgtagttgtctacagcatcaggtctcccaaactgtccacagagtccatgcctgttccttgtctgcactgtgaccatgaccaatccctctatcacactgtctagtcttgggcttcctctctttgccccagcccaggcctgccttcttcatttcttcgagctcccagcccttagcagaaagcacaaatgaagtcagtagtcctgctccatctctgataaactaaacctaaccgcccctaaggcggctgttgctatctaacagttccgtgtgaccttctctctggggctcctgctacagcccaggttttccagggtggtcaagctgtcagacatccaagtttacatcgttgtaattattataggtctttaaattttacaagggtttggggttattttgttttgttttgttggctttgtttttgtataaaagagtctaacattttttgccaaacagatatatatttaatgaagagatacataaatgtgtgtactttccagctttttttttaattattttaatcccaaacatcttcctgagagtaacactcccttaaacatgctgtggaataaaattaaatgtgaag

SEQ ID NO: 1586 - protein, 434 aa, Mus musculus
MAHQLYVLQVLTFNLLEDRMMTKMDPQDQAQRDIIFELRRIAFDAESEPNNSSGSMEKRKSMYTRDYKKLGFINHVNPAMDFTQTPPGMLALDNMLYFAKHHQDAYIRIVLENSSREDKHECPFGRSSIELTKMLCEILKVGELPSETCNDFHPMFFTHDRSFEEFFCICIQLLNKTWKEMRATSEDFNKVTGVVMQVVKEQVMRALTTKPSSLDQFKSKLQNLSYTEILKIRQSMNQEDFQSRPILKEKIQPEILIKQQRLNRLVEGTCFRKLNARRRQDKFWYCRLSPNHKVLHYGDLEESPQGEVPHDSLQDKLPVADIKAVVTGKDCPHMKEKGALKQNKEVLELAFSILYDSNCQLNFIAPDKHEYCIWTDQALLGKDMMSDLTRNDLDTLLSMEIKLRLLDLENIQIPDAPPPIPKEPSNYDFVYDCN

SEQ ID NO: 1587 - DNA, 615073 bp, Homo sapiens
ttctgtttaccactgattaacaaatggagagctgctgtctgcagaggtggaagatttgcctagaaaaggctggggctgcaagtttgtaattgacatccccaagactgggagcggtgagctgaggggatgagaacatgcctgccagttctgtgtacggacaccctaaagacagaactgctagtatcccctatccacagagctcacaggtggtcctcatagtctgggagaagcctgctggggaaacgaaatttcataacagctgaaaacagccacacatcacagacataaatattagcgaatataaactaatgattactaaactatcagaaaaacacatcagtgcctgagttaagaatcaaggctaagaaacagaaaaaatggaccccagcttaacagacaactcaggaaacaaagagaattttaaaaataagacccaataacttttaatcaaaatgtcatcagagatttgagaaaatattatgtccttaaaagagaaaatgggctgccataaaaaaaggaataattagaaatactaaaacacacgatggctgatactaaaataattcaatataagggtcagaggataaagtcaaagacaacttccagaacagcactgagcaaacaaaggaagaaaggtaggacatggctgggcgcggtggctcatgcctgtgatcccagcactttgggaggccgaggggggtggatcacgaggtcaagagatctgagaccatcctggctaacatgggtgaaaccccatcactactaaaaatacaaaaaattagctgggcgtggtggcatgcacctgtagtcccagctactcaggaggctgaggcaggagaatcacttaaacatgggaggcagaggttgcagtgagctgagatcaaaccactgaactccagcctgggcgacagagcaagactctgtctcaaaaaaaaaaaaaaaaaaaaaaaaaagtaaggtaggagataaaaagagttgatacagaatacagaagatccaacactgacttacatagaacttctaggaaggagattacagaaaatagagtgaaaatgtttaaaaaatggggacaaaattcctcaggctgaagagagacaagtctttagattgaaactccctaagtagtgccaattgggaaaaatgataaaatattcacacccatctccatcctgataacagttcagaatggcaagaataaagagaagattctaaatgcttctagaaatgagaacatataacataggcgcacacacacacacagacacgaggcataccacaaaagaaggtcacctgggcttcagatttcttatcagcttgaagataggaacaacgcttttaataattctgatgaaaaacattttgatatttatgatccaataactaaataaacaatcaaatgtaactgcaaaacaaagatgttttctgacatgcagcttctcaggaaagtttaccttccatttatactttctggaaaaaaattataaggtgctatgtacttcagaggagaaagaagtctgtgaaagcagcagacaaggtattcaagaaaccatggaaatgaacagagaataatgagacgaaacccttggcaaacagcaggaaagtgggccaaactgggacagaaaatctgttttccaaaacttctggtgtcttttttccttcctccctttcttcctttttccccttcctttttttatttcttcctttttctagagtggctatggagtcttctttttatatcttttcttttgggggatttggtgctagaagaagggtagatatgcatcatgaggacactagatttccacacttaatattacttttacattttggatgtttactacacttacattctgctaccttctatcttgacactataattaaagtttatctatagatttattctaaaaattgaaaaacagaatttacagcattgtaattatgcaatattattcatagcagagcctaagagcatggctggacctgaagagaaggggtataatccttagacatggaggatgatttcaagaggaaagtgcattccatttttttttttttttttgagatggagtttccctcttgttgcccaggctggagtgcatgattttggctcactgcaacctctgcctccccgattcaagcaattctcctgcatccgcctcctcagtagctggaattagaggtgcgtgccaccacgcccagctaattttttgtatttttagtagagacagggtttcatcatgttggccaggctggtctcgaactcctgacctcaggtgatccaccttcctcggcctcccaaagtgctgggattacaggcatgagccaccacacccaggggaaagtggatttcattttttacaacatagaagacttccatgtgtttcagcaatttaaaactccaatgagagcaaaacacaaagaaaggcatggtatctccataaagtatactgaattatatcaaaatttggggcaactgagagaatgtcaaaagagagaatctgtttgatcttgacccttgatacattcttcctcaaaggtgacaggtttaatgatgtagcactagatcagagactgaggagattaaaatggaaggaaaccacagccccaaatctttttctttctttttttttttttttgagatggagtcttgctctgttgcccaggctggagtgcagtggcaccatcttgcctcactgcaacctccgtctcccaggctcaagcaattctcctgcctcagtctcctgagtagctgggattagaggtgcatgccaccacacctggctaatttttgtatttttagtagagacagggtttcaccatgttggccaggctggtcttgaactcctgaccttaggtgatccacctgcctcggcctcccaaagtgctgggattacaggtgtgagccaccttgcctggcaccacagccccaaatctaagctgaaaattactaccacaaaggtagaagccatttggttcaagggtgctctgagtctggcataaacacacacaaagaaaggaaagtgtccaagggtactgattaattgtgggactactctctctcttctctgccccaactatcactttttgcggaggagctcacagccttactcttccttccccacagggcagtgaatatgagcaactgggttgaaatggaggggctccaggtatcctctcatctcctggagggggagtgctaccacacactggagataaactaccggcatgtccacctggcaatccatttcttcttctccgggatcaccagttgcaagctgcagaaaatagaaacagctggcaggtgaacagagaatcacattagtaaagttcagcatgcaaacaaggagacatccaacttaaactgagtaactataacctaggaaagtagaggtaatagagtaaataaaaaaaaaaagaatttggaagaaatactaatagcctcacagcaataagagaggctattatatccataaaacaagagcagctgatgtcttaggtcaggttgtccaggacacatactctgagactgaggcttgcatactggagggtgacttaggagtacccttgagatccacacttgagaaaaactgaggtaagcaggactgagcagaggaagaagttgagatgcaatgtagtcacaacagaggacccagccaacttcatggggagctctggagctgtattcgggcatcagccatcagttgtgtgattggatgatgcagcaccttggtcctgagccaggggatgagggggtgtgcccacagcgcccattagaggtaattataaaaaactgccaatgagaaaattaagaaatttaaattatgatcattaaaaatttgaaaaccacttaactacataaatagaaagaatagacaaggctaaagactgacttaacgaattggaagatagagccagaggattgtcccagagggcactactaagactcataggaatagaaacaatgagagaaaagttaagtgacgtgaatgagaatatcagaaggcccatgagatagaaaatttatcaataaaaaaagctattatacaatcaaagaaataatagaagattaggaaagagaggtaagtaaacaaaagttatgaaagcttttcagaggagggagttaataaatactgtctgaagttggtcaaacaaaatagtacagttagaagcatggcatgaattaccaaaaaattcaaaaaagaaaaaactcagtgtgttgacctctagggactaggactgtgaatgtatatattcattatatatctataaattagtaaatatttacttactaataatatttattaataatagtaaatggacatatttatttaaaacattttgaagacaaagtaaagaatattggtactttcacctgactgtcatgcaatcgattaataaccattacaagtgtatagtggttagcattcatgttggctccatttttgagcattcagtatgtgctaggcactgtctgaaagaagtatcattatcccaacatccatgttttataggcttagagaaaaataagttacgtggctattaagaagtagagctaggattttcacatctgtagacttcaaagcatggacatttaaatattctgtaaattttgctctcatgagactgttcagtcaatcctgttgtcagtatttattgtaatattggagggattccttgagttactgattaatactatttctttggctgttgttcatcagacactgggtggtagacaatggatatagatctaagaagtcttgataaatctacccagcaaaactcgaaacaggagaacacatctgattaataggtgacttagaagtccacggagatattttttgtttaaaagcagggtggaacagctggagcagaggggtactggtgcagacagtaaattttgcatttttgggtggatgttcttcaccaatggacagtaatacaatgattaagaaatggggacacattggagatgaatgcaaagtaatggtgtcacagaaagtcaaacaagaggggagtcatcccttttacatcttcagtctgtcctcgacctgggaataaatgttgtaggtgatattgtgttggacactaggctacaagaaagccaagcaagtttagtgtttggttgagccgatgcaggaagacgaaagcaaattgctagtttgagagcttccccaaccagagtgaacatcagttctacgtgccctctactgcaaacgtaactaacacttgaatttctctagttctcctcagcttctccattaatgcatgacttaggctcccatcatctctgacctcaatgcaataattccatatctgttggttatgaattgaatgcttgttctcccccaaaattcgtatgttgaagccctcaccacaaatgtgatggtatatggagatggggctttgagaagtaattaggttgagatgaggccttgagggtggtgacctcctgctggggttggtgcccttgtaagaagagatacccgagagctttctcttgctctttctgccatgtaaggacatagtaaggaggcagcagtctgtgggccaggaagtgagccctcaccagaagccaaccatgtcagcactctgacctcagacttccagccttcagaagtgtgagaaaataaatttctgttctttaagccacccagtccatggaattctgttatggcagaatgagcagactaagacattattcttcccacatgcatttttgtctccccactaattcattcactatttagtaggatgacctttaaaacaacaactgaccacaaccatcagttgcttaaaacatttcagtggaaaacaaaccaaatccaaaacttattaggcctttccatcatccttaatacatccaaattctgtgatatgactctcaagggcttccaaattttggcttttgcccattacttttagatttaattttgatactctcagactttggccaaatagactttttaaggttcctcccacactatgatttctcctggggtgtccaattgtttggcttccctgggccacattggaagaagaagaattgtcttgggccacacataaaatacactagcactaatgatgagctaaaaaaaaaatcacaaaaaaactcataatgttttaagaaggttcacaattttgtgttggactgcattcaaagtcgtcctgggccacatgcggactgtgggccgtgggttggacaagcttgatgtgaaccttcatacaaagttaactgtttttgcttagaatccttcctcattaccaacctacttccttttgtctttttgtcctggataacacctcctcactcacccttcaggtctcaaatcaacagaacttccccaggaggcttttcctgacttacagatgatgttagcatccctgtctccgcatagtcctgcaatcttctgtccttctcctaatattatactcctcacttgtttttatggccatttaaaatctgtcttctgagctagaatgggagtgccaaaagggggcaagccatgtttgtcttgttcgtgattgtactctcccttcctcccttttaaactcacatttaaggcattcagtgcacgttgaattaatgaacgatcaagtgaaggaatgccctctcacagcagccctccgtgtcattctgcttgttgcagggctgaccctagtggctctaaattgcaggtgtctgcctgctgcccagatctcattatccctggtgtagcggcttcctggagctgaggcaactctctatgtccccagagctgtttgaagactggaggcaaaccagcatgagcctgattctaacacaagaaaagggaatagatttgtcaaactgtagatcaaggaatttagtgctgatttggagcagaaatttggagcaaattactgaatgtattattaaatgcacaggatccatttagaatccaatgtttaaaaattaaattagaaattaatatttatgagcacttaggaaggagttgatcaatgtgagtcatcattgattaaaaatacaacaggccattattgcagtttggggtttcatggtgacactttgcatggtgacattttgataggatctcaatcctcctagtttggaattttgtacacacaaggaaagataaagacatgggaaacacaagatcaaagtatttaaatatgagaaactgccccaaatacctctctgtccattaacaattcaaagctttcttatagaaacacggtgggggaatgaagcttagacttgaggcttaagtgattttgattttccagccatctgtccctaccctgctctcttttcctctacttatcctgaaactaagacagatggttctacagaggagatcctgaatcagtctccctaaccacttgagatgtggatgaggctggcctgtctgcacaaaggtctaagttctgcccaggtgggcttaccagaagtgcaagtgaagggatgcacttggattctgttccttgctataaaatggccgtcctcactgctaaagcatgacctaatgattgaatggcccaagctgtgaccaggagctgagaagggacagtggcaacagatctttctcaccattatgggtggagactgacatgtgaaaagagggagtggatgttgctcttttattttttgagtctgttaatatgacttgtccattgaagaactattgtagataataatagctaacattcaatgagtgtttctatgtgttaggccctgttaagaatttttcatgaattaactcatttaatcttcacttaaccgtatctggcagacatggtttcaatctcatgagttaagagtaatgcagccagtaaatggtaatggtgggatttatacacaacaaccaggtccaaagatggagcccacatacatgacaacaccacatattccactttattgcatccattgctgaccaccagcagagctgagggagaaggcgggttcctctaagacacttgacaatacttctaagatgtctttatgaatagaagagaaaattgaagtttggcaattgcactgttaagcagtttattaataaccagtgaaccaaagaatgctattctcccagcttagcagagggagctccttagtgggatgtcatgtggcatcttaatattttaatgtaatccatggatatggggagacactggatgcctgaattaaatcctaagggacttagagaaagtggatcaggaactttggttccaaagatcaactccatgttcccgcacatggcctaaccgtaacactgtaaagaatttccagtcttcccctttcactcctatcaacactgagatgtatttgagaaaaaaaaaaaaagagagagagagagaagatctcaggctgtattgtgtttgctaatggttaattacgtaattaatctataagactacttttttttctttttttcttttttcttttttttttttaaagggcagagacagatattcttctgggagaagatggctcaaatgagagagacttgaagccatgtcacatgaagaagagtcagaataattgaggatggttaatcctcaaaagagagtgtttaggtaaaatttgagggctaacttcaaagatctgaaagactacttcatggaggaaagatgtgaagacccgggaccaaaggttacaggggagtggatttgcataattgctgtgcaaggagggaacaattatgacagctaatgtttactgagtgctcaccacgcatgcactaaagttaaggtctttatatgccttagctacaaggttgtagatcaaattcatacttatcactacaagtgtctcagagcatcgttagtaaaggctccatttactgactacttattaaattacttcatttaatagttggtgctattgacttttgttattatatcattactgttttatagatgaggaaatacagaagttaagttgctttcctgcagtcaccctgctttagttactggcttataaccatctggacccaggcactcttgatactaatactgcctcccagagtcatgcgtataataaggagttagatcagagctgttcattaaaagtataaggtgagccactaatgagagcctatgtgtagccttacattttctagtagctacatcagaaaatgtaaaaagaaactggtgaaattaatcttatatatgcttatatcttaacccaacacatgacgaatccaactgacttactacatcagactattctcatgtattgcaataatgtaatcaacataaacatacttaacaagttagtttacattcattttaaaaatactgaattgtatgtctgttttacacttacagaacatctcagggatagccacatttcaagtgctcaacagctgcctgtggctcttgagggggaagatcttaaaagggagcttagttttccaccttgattctgatgcctccctgcccccgacttatttcctttgccaattagaagaaaatgccgaactgcctttgacttttccggtagagccaatgtaggtatttctgaactgggggaggacaggtggttcgcctgcaaccctcttccctcctgccagctaggctgggagttaacgtttttgatttctgctttgaaaatgatttaagtaggttgcatgaattaagtaatttattctaaatatcaaattatgggtggaacgtcttgccttatgcaaagttatgcaaaattaggaagtccctggcttaattggttagaaatacatcttgtagtttcaattgcagggttagtaaatacatagatgtcgacggagagggaggaaacttttttttttttttttttgccactctgtccaagggtagaggcacagcgtcaaaacaaacacgtcttaaagtagcgttcaaacagcccaccgaagtttccccttaatatccggaaccggttgccaaaaattaaaaaaggatgtgaaaagatgctactcgcttttggcctcccggagatggcgctatgagggtgacggagttaattagtgcctccaaacgccgtgtgtgagctcatcgaagtcatgctctgcacacatattatttatagcagatctgaggcatgcatggtgtttgacatttctgtcttttaagtagggggacttcaaaaagtcgtgggcatccccctaggcaaagtgcagtgggcagggaccaggcagggtgcgggcgcaaggcgaacgcgcagaccacgagtgtcctggcgcaggtgccgggggcggcggctgcaactccgcagcgtccgctcgggaggagagttcgcggctgatctccggatgccttgcagatgcaaaatgtgtctctggccagcaggaggaaggaagaggaagtgagagcagcggcagccggcggtgcagcagccggccgacccagagtgtaagtgcgtgtgctggggcgagcgggagcgggcgaggatgggcacaggatagaggcagagccacccacgccgccgcggccccacgctgggcgacagagcctccagttccccttcaatggtggcgggtcgccggagctctgatcgccgggaacccttgccgctgctgtcctgcgaccccaagcaggttcgtaaagtttcctgggctggcgccgcgccccgactcgctgacctcggcgcggcaggggagggggccgggactggggccgggaggaggcgtcctgctccgggggactccgggcgccgcggagacacttttgtttcctccctgggggcgccgcggctcgggcgggggtggccgccgcgctcggcagggtgagggctgcgggcgcgtcggggcgctctgcagttggggaagtctgagctccggggatggcgggagtgggagtgggagcggagggagggggcgctggaggtgcggcgcccgcggatgaagcgcagggcccggggcccgggagcccgccgagacatttcgaccagggtctgcgggagggggggcgcgggagggttgcgacgctggcgcggggttactggggacgggggatgtggggctgggatcttggagtcaagattcctatagagctagagaagcggctgcggctcagactcggcgtcttctcctgcactcggggatgggagggaatcccccggcgagcgcgctcgtgggagggggcggtgatgggccagaggaatgggggccaggagggccggagagggcggtctgggcagccgggagcccctgaggttctggttagtaaatactctcctcccggggacacaccggggtctccgccgagaccgagagaggcggcggggagctttgtggagcttcgtggaaatctcggcttcggagaggggacgcaccgggcgcgccttcagagaagggggcggcggcatgccagggggcccgggaatcggagcggagagtggcgactgcgatcgccggagtcgctttgaggaagaggaaatacagaactcagctgtcccgggggtgcgcgcgtgtgtttggggttgggaagtcggtgctgtgccgcgagcgcgcgcgaggcggcgtgtgtgtgtgtgtgtgtgtgtgtgtgtgtgtgtggtgtgtgcgcgcgcgcgtatgtatgtgtgtgtggtgtgtcgtcggtgtgtgtgtgagtgtgtgtgtgtggggggggtgttgtgggtgtgtgtgtgagtcggtgtgtgtgtgtgtgaccgcacagccaggaactccccgcccagtgaccctctcccgcctagggggccatttgaagttggaggcgggtcgggacctgccttgacctaaaggaccagcctcaggcttggtcccaggtagtgacccagctctgagagtccctggacggctcccgagactcagtgaatatatttgggatgccccccgcgctggatcatgggcttcccaacaccgctggccttgaatgattcgggcctaattcgttatggttaagatttcagataatctaagacgggttgaggcctccagaagcggaggcttcctgttgggcgctgccagtgacttggggatgaagctatggaagaatatctgagtgtttctcttttgcttctataaaagtaattaatgacctgtatttacacaccaaaaccctgcgagcaactttgggacatagagggatataatccttctcagaatcactttgagattgcaaaaaccggcagcagctattattggggtctcctctggccagggttctcatattatctcacctccatgcctactttccaaggttgtttcaagcattaatgtcccataatttacagatctgggggaaaataatggtaagttaggaggccagatcccctgcagaaacatcacatatttttaatttttcttatagctgaccttttgaagctttactctttattattgtacatttcctatctctggaaggctgtggttaaatgtgcatgctgccttgtttctactctgttttgtttgtttttattaggttggtaaattttgagaaaatgacctggactgctgggactcttggggaggggttgtgtcaggagggtactgaactggagaacaagaagtatggtaggtatcagggaggggcaggctcggaggcagacccggatgggagtctggggaaactcagggcctggagcagtcattgggcaagaagatgggcagttctagtgatggtcatgcttactgtccttggtaactgcaggcaccctcaccgtcttacattcttctttttcactgagttctctccctagggcctttgcccatgatattacaggaggagcttttctcccacatgtccagatgactcacttcccctgcttctttcaggtctctgtccagttgtcagcttatagggggccttccctggctaccccatataaaatagcagccagacactccctgggcctcttatgttactcagttttttgtcttagtaccttttactccctggcattatacagtcattggtgtattttgagtattgtctctctccctgttagagcagaagttccatgagggtagtgactaccttgtcttgtttacagctccagaacctggatggattcttagcatgatgtcggtgctcaataagtgtttgttgactgactaaatgagaggtggctatactgggagagatccaccagggaaatataccaggaaaatgttgcagcattagtgcaagtgagaagcccaggtaatgggcttttgcttttttcgctgtcctttcccccatgccaggccactcttcttttagactctgttctgccttgagtagactcctccctttttctgcctgaagaaaggaacagagaggtgattccttgggagattagataaccagtacacttaatgacacataaccattccagatctggtgtttcatcactctccttggagaaggtcttttaaagaagtctgtgttgctttagcctaggaggaagggcatgattgtaaggggattgaagtcagaggcatctactgtgtcccattctgctctcctacaatatggaagtgaagacaggaggctgtaagggaggctgtgtggcagatgcaggggagatgagaaatgcctaggagaagaaaaataaaagtgagaaaacattaaggtgttctgcaggtgcagctaagtcttgaacatttactaaattactatattgaaaagaagctaactcttgagtgtttcaaagtaatttaacccctttgggtgtttggtgtgagtgggtggggcgggtggggaaagggctttgaagcctttgctgaaggatgtggctgggggtgaggcaaggagctcacctgatcacacactgtgcttacttcatcaggttgcctaatgctcaagggttaaaggtgatcattcctatggaggtaacatttcccttccagatctaagacagtggatacaattaaggtttgtaactcaagcttgtaaccactttttggtgcctgaaaccatccaagtagatagtttggtttataagacattctgttgaatctggaaaacgtggtggattaagaaaccctctctgcatcacaaagcctggagtgtttgctactaattgtgcaactttagttctggttccttctagtcaaccagagaagtgctttttaagcttacggctgtaacccatgagcggatcatgatatcactttagtaggccaagaccagcagtttaaaatgtgaaagagaagagtggtgtggaaaacagcatttcataaaacagacacccagtcttaatgtcaaagtattgctcagtgtaggtaacgattttaaaaagcctgtttcaataattctggggaaaactacatttttaaccaacttgccagggattctgatgacgacgttctagagggctacaagaaatacttagctatctccttttaacaaaatactgttggtttaaccccctgcaggagatgctatttccaaatgttgaaccagatgcagttctgtcggctattgacttaacttttcaaaatgctactattggccgggcgcggtggctcacgcctctaatcccagcactttgggagtccgaggcgggtggattgcgaggtcaggagatccagaccatcctggctaaggcggtgaaaccccgtctctattgaaaatacaaaaaaaattagccgggcgtggtagtgggtgcctgtagtcccagctgctctggaggctgaggtaggagaattgagtgaacccgggaggcagagcttacagtgagctgagattgcgccactgcactccagcctgggcgacagagcaagactccatctcaaaaaaaaaaatgccactatttgtagaacttgccagtgcgctaggccctcatgctgccatcttggaggaactagaaactcaagtgacatgcttttcactttagtgatgcagaaaggcagtagctccctttgcaataactctttaaccttacttagaataaaatcgacagactatccccttttctcaccaagttttagtttagaacttttgaggtctttggaaatttactctgctcaacttctcctttcatattttacatctagtgttccccacatgaatgattctaattacaaagacagttgtaatctcttctggaggcagccacactgctgggatgcatgattaggtgaagcattttagctgacctgggcttggattggctatccaaagaagaaagtcaaaggctgacaactcagcctgggcaacatagcgagaccacatctctcaaaagttaaaaaattagctgggtatgatggcatgcacctgtagtcccagctacttggtaggctgaggcaagagaatggcttgagtccaggagtctgaggctgcagtgagctgtgatctcaccacggtgctccaggttgggggacagaaaaagaccccatctctttaaaaaaagagtctgagaacttctgcactgtccataataaaaggatcatgaaggccagtcattccacagggtgtggctcccaggaccatgtgtgtggccatgaaagccttccagtatgccagcacagcatttttaggttcagcaaagccagcctgcatgtacaatgcacacactggttgcaatgcttatttccctggataatttgggttgtttgagtgttaacaattggaacttatctatattagccagaactaaagcctgcaaagccatatcatgattcctgattacattaactacttgtgtcttagtgctgtattttctaacctgttacaatataagtgcaggtacggtacgagcagaatttggtcattggcctaaggtggggtgaacagttaagtatcagataggaatacgtgtgggagaaggaatgctagctcatcaaacagaattaactacagtaacaaactggcatagtgctgagtcgagaaattagtcacatgtataaatagaaggagacgattctcagtgttccgggcccccacaaacactgatttccagaatctgaacagaattattattggaacttcaattttaggaattgaggctacagttttgactgttttagttctaacagttaaggtagaaaacaaaactttcctcagtagaaaacactggagaggcacaacttgctggactaaggactgagatgtgttcagtgggttgtactctggatagggaatggtggtttgagggaatgaaaatcaggtaagccctataaagcattctctcagtggaggtggagtcataggatcaatgcgacatttttctctgtggcctgacacacccttcctctggggatgctgttttggaaatgatggagaacagtcagaatagtattgttatcccattttacagatgtggcttggaggaatgaaatgtcacaagcatacttagagagtgcatctgagccttaaacccaacttttctgactcgttttactgcgttgtttctttctcctgcaccatgatgtctgcactggttagttccttcttttgttggttcactggacttgccagcctctgaggccaggatgccatgtggagctatgctgcagtggtgtccagagaggctcttcactcctgtatgtcctgcagatggatgtgccctgggttgccatggtatccagggatgtcaatgctgccactgagtcctagttcttcagagtcaatccctctctttgggtatctcattctaaagttgaccttagttttgagagtcaatggattcttctctcagggacagtatgtccatcagccaacctcatgatattgaagcatatgagctagaatgcaatttattaataaaaaatgagaacagtatttgccaagaagaatgggcgtttattctttagccaacatttttcctctgtggatgagtcatggtgaaggcaaaagcatggaaccacctgggaaggaaccagttggaaggggaatatacttgacagtgttttccagctcctcataacttttgctaattctcttgttgatagattcataccaactaagaaaaccagagactggagtcctttgaccgtgatggtttctcctttgggcgatgctgaggctacttgtacggttctttttctacttgtaggctgttggccattttactgacccattatttcaggcagtgtcagcctcagtgctattgacatttcgggctggataatcctttgttgtaagggctgtcctgtgtactgtcgaatgtttactgccttccctggcctctgttcactaatgccagtacattagtcgtttgtgacaaccccagatgtctccaggtattgcagattgtcctatcaattttcctgtccccaagctgagaactgctgctttgtcttcctgtgttagtgagaccagttgtgtgttatcagatagtctagactttcaacagcagttataagtgccccagttttctccttactggttattccttagagtctaaggtggtgtattaataaatgagagggctcaccctttatgttcatttctttcctccagctctccaagtttcctttctagctctcttctctcttatactgcagttgtttctctaatccaaatgtttttcaagtttcctttccatgcatgtttcttcctagtacctgtggctgaaaaacactgtaactagtgagtttttgtctcagtttcttaacaacgttttgaattctgaccactggttactgccttaactgtaacctttacataatggcaataagataaatgaaatgaggaaggtgggtagcaaagctcagcttggcttgttcagaggcctttgtcacaagacaaaggaaatgtctgtgtgggaatgagttaagtgagttcagtgcctcctcctttgcttgtcaaatccaccttgactagttggatagtaatggttattgatattccattagtgcgaccaggacattgtagcaggtcagggagaagccttcaaggtactgctttatgcgaagtcctttcccactttgtatattagatttctgtcctaatcttgccatgttaactttcttatgtaattatctgtcagccttttatttaccttctctgcttggctgctgtcgtagtccagaacaccatcgagtggcttaagtgccgtagaaatattgctgggttatagactagctatgactcccctaggcagccgccttcttacagttcaccagccctatagcaaccctccacccttccttccgccctttgtgtctttttttttttttcagttcagaattgcatttagaacgccagagttttgtgctgtggggttcagtggcagagctggatgagctgtattttccaggctgctacacacaattacccttaattttgaagagtaatccatttcaaaataattttttttttgtttttggtctctttagcccaaatgcgtaaccacagctggctttacccttggccctcagaaagcatgtggcttgggaggtagagctagtggaggagtttggtcagattgctcatttttggtcaagtgaggagtgaattccaataacactcagtaaggctggtttttatttgactcccgtccacccctccaactctccccaccccacagtttcctagatttttttttttttttgagatggagtctcactctgtcacccaggctggagtgtagtggcgcgatcttggctcactgcaagctctgccaaccgagttcaagcgattctcctgcctcagcctcctgagtaactgagattacagatgcccaccaccatgcctggctaatttttgtatttttattagagatggggtttcaccatgttggtcaggcttgtctcaaactcctgacctcgtgatccacccgcctcagcctcccaaaatgctgggattacaggtgtgagccaccacacccagcctctttgttttttctttctttttcttttctttgctttttttttttttgagctagagtcttgctctgttgcccaggctggagtgcagtggcacgatcgtggctcactgtaacctctgcctcttgggttcaagtgattcttctgcctcagcctccccagtaactgggactacaggtgcctgccatcacacctggctaatttttgtatttgtagtggagacaaggtttcaccatattgaccaggctggtctcgaactcctgaccttgtgatccgcctgccttggcctcccaaagtgttgtgattacagacatgagccactgtgcctggcccctagatttttttatagtggacttgtgcctcagttattccaattgtgggccactctgggaagtgaccactactcagaaattttggtttgggggagtgggaccgattctttgatatattaaataataagtgctttgtacatatatgtgtgtgtgagagaaagacacacacacacacacacacccatgcagctctaataatgaaaggcctttagaagcaaagaaacaattatatcagctgctaaatcctgttttctccagtgctgtcacttttatagtaagtcagcacaaatcacatgaaattaaacattttgtcaaggaatgaatatgtttccatcatctctaggcttactccactgccaggaagcgactttgactcattagaactactttctcaattactgtccattctccaactgaaggtttttgagaaacatttgcttgggtttatatgagagaagcacagtaaagctttatttattaattgtagtatattttaaaaacagatgttgagcttatccttaaaatgtatataaatattttcaagctaaactattgctgggcttatagccctgatcataatgcttcattcagtcattcaagtcagtcaacagccactttgcttgtaatttgtatgctgtagcctgggcactccatatgtggagaaggggtagggagggctgtaacaggcaaatctgtttagagacagtcataacagtatgctaaaggtatgtttaccgtgattgcagatcacagaggtaggtgttcacaaatgaggtgacttttgagaaagatctggaaagctgagtattaagagaaagaatatgatacatccagggaatatagcaatcagggtgatggaggacagtctggaaggggctttatgtcagcaatcccaggagctgggcatttggattcagcagaaaggaaagccaaaggcttttaggcaaggaaaagatgcagtgcattccagtgagagcaacctggaggatagattagatggtacagctggagggaggggcagaggaaagatgggagctcctgctaggcctgctcaaataaatacatggtcttggtcagatgaataaataaacaaagcagtgtgcttgctgtgccaatgcaactaggagacaggttgtccagcccccgccttccagcgggtgccagccagagtctgagcagaggtaaaggaggggaggccagcactcaccgtgtttgcctgtagatattgatgacaaaattaaatgatttgctaagtgattggatttgggaaaaaggagaaggagtctttgaggtttaaagcgccataagcacatacttgttaatggagggttcagatctcctgttgagtacagcagatgggtgacttcaggtaagttagtgatcttccttagcctcagttttcacatctttcaagtgtaggtaatataagtccccacctcttcgagtagctgagatgattaaatgcaatcatgattgtaaagtagagtaccctaaaagcgttgggttggatttgctattattattgaggttattatcactgattcagtagtgttttttttttgagacagagtctcattctgttgctcaggctggagtgcagtggcgcgatctcggctcactgcaatctccgcctcccgggttcacgccattctcctgccccagcctccgaagtagctgggactacaggctcccgccaccacgcccggctaatttttttttttttttttttgtatttttagtagagacaggatttcactgtgttagccaggatggtctcgatctcctgacctcgtgatcctcctgcctcggcctcccaaagtgctgggattacaggcatgagccaccgcgcccggcccgattcagtagtttctattcaggttctttattaaactatcttgctaaaatcataaaaagagatgcattttgtatttaattttcttcaagtgacctaggtaactgctcctaaagtcttgactagaattagtttgctttatatgtcttttcttcaagaaaacaagaggaaaggtggggttggcagggaaagaggagatgttggtcaaacccagatagaaagtttcagtcagacaggaggaataagttctggtgattttattacacagcatggtggcaatagttaataattatatattgtatatttcttttttttttttttttttgagacggagtctcgctctgtcgcccaggccggactgcggactgcagtggcgcaatctcggctcactgcaagctccgcttcccgggttcacgccattctcctgcctcagcctcccgagtagctgggactacaggcgcccgccaccgcgcccggctaattttttttgtatttttttagtagagacggggtttcaccttgttagccaggatggtctcgatctcctgacctcatgatccacccgcctcggcctcccaaagtgctgggattacaggcgtgagccaccgcgcccggcctattgtatatttcaaaacagctaaaagaggggattttaaatgttcccaccacaaaggaatgctaaatatttgaagtgatagatatgttcattagcctgatttgatcattccttaggtatacatgtatcaatacgtccaattgtacctcataaatatgaatgattactatttgttaattaaaaatgaaacttaaaccagtacaggagaagtaccaactgttaaaatacagacggggatgagttatgattgactgtgaattaaaataactgatgtaatgactgaagttagcaatttagggtcctcaaatgaaagctcttctaatgtgtatccccagttccatttgaactaacctgagattttactgttttattgtattattaatttttttttactttgaggggagagaatggagatggctccattggagctctttcccttttcttgattccagcttttgaggttgtttgcatttgtccaagggtgcacaggggccctgggagaaaccccatgtcattggagtaacagtgaaggagcaattgtcaggaatttcattcagttgaactgggtttcatatgattatgttgcatataaaggaggttcaatgggtccattcatgctttggaaatgtccctttttcaatcgtttggaaccttccaccaagtaggggactgttgaaatgttcattggcaggtgggtggttgtaaattgttaaattttcttctttaatctgagccagatgatcaagctgtcaaccagattagaaattatcctgggaataaaaatagaaaaataaaagaagaatgtctgtagtcccaagtgtacagacccagtgtggccccattgtcccagcacgttcaattacaccagctttcactttccaagtgcagtgggttggacaattcattttatggccacctaagtggaagccacctgcttccatttccaatcgctctctctggatgtggccggtttgtttgggtgctttttctacttattgcttcttcagaaaggcagcaactagcttacaggcacaccagctcattaagcagtagctcatgtacccattaaacagtcacttagtaacagcttttaaggagtgggttgaaaagagagaaaccttcatctagacactaaaatgccctggatagaagtatgggtgtcagagagccatgtgccaaacagaaactgcttctccaaattagtgctttgaaagtgataacttttggtctccaccttgacttccattactatagtcatgaaaatcacttgtctaatggctgtatgcatatcttcattggacctgacaaatatacagtcttcagtgtgaaaaatttctggtcactttattttacctaggagagtggtaaacatgggttattcagcaactacagtgtccgctgtgtagcaacgcctcttttctatatatcaggattggtgtgtaccttgaaatagaatccaatggtaaatatatgtttaaagacccataagaagacttagataatgaaatacagatctacagtaactcactggagagttatgttcttaccaaaatatctagcagcttaaaagtgatttcaaacatgtacccattttacagatgagggaattcaggtgtcagggaagctggctgcccaacttcacatagactcaaaaccataccctcttttctgcagcataccatatggtacatacccctgctgccaagttttcatcacttttgcctcagttgaacctgctacactggatcattgtgttgagttgagctacttggtgaaggatggcgaatgatttgctgcctcaggagtgtgtaaaagagcaccgtcggggcagcaaaccattaccccagctgtggctgaggatggtagagagaagagcgtgtaatagagattcctttaaatacccagtgagacatccttccagtcataagcgttgtcatataattattgtcaactggtttagggccatgttgaatcttttcaaatgtgttgctaaccattctagcatgtgcaagtgtgtaatgaaacagtctgagactcggcgtctggacctgggaatgataagacaggcagatgagggtgtctgaaaatacaagaagttgtgaaaattctcagatttgtttttatctcaacatatatctttaagacaattttttatgactagatcaaagcaaggcacagagaaatggcataacagtagttttaatgttgagtttcaccctttcgaaatccagaagttgtattaggaatagtttggtccatccattagaagtgataagtgctttgaagagtattggatcgtatgcagggggtggaaaccaccctaggactttagtccttggctgggaagagactgctgcctttaactttcaggaaagggataggagtattttaaattcttaattgctactgtgtgcctggatttgttccagcatttgatttggaaatattctttatttttcttctttttctttttcaaggctagtcaagtgaagtagtgggagtggagaaggaacaaagaaatctgtaaatggttaagatcaattagttgtaaacacctcggcacttggaccaaacggaaatattcatttgttaattcacaaatatttattgagcgcctgctgtgtaccatgtggtgtactaggtgatccataaacaatggtgagcctccttccaagagaaaaataggcctgttgatttcatgggctgggctgcttatacattagaggaggaagtttgcattgatcaaaggatcacacaaataagtgtgatgtttaaactctgctaagggctgttgaagggggagttactgatgctcagggcgcctacaacagggagattaatgtagtcagggaggtcagggaggagggtgaaagaattttactgggtacagacaactagcacatgaaggctgtgtaaaaggctgaccttggatgttgcaggaactggggagcagagtgcctgaggcagggagcactccagcgtggattagactggagaggaggcctgattgggatcatggggctgagcttttatcaaaagggcaaagggaagtgactgaagagttttacccaagggagtgacgtgatctgatttatgctttgaaaagatccttctggcttcaacctgtaaattttacatcatttaaaattggtcacaatgtgactgtacaatcactcctgttagaatctaaccatttctaaaagaatcaatttagccactagtgtcttctttaaattttaaacagcaatttaaaggagtgatttagcatgggtaatgcaaccacttaggaatgatgaagtacctagttctgtggttctcagacttcagaatgcttaagaatcactggggacccaggaaacagcatttttagcagcctctcaggtgatcccagtgcacgtggtcccagacttcacttttcttttctttcaagaagcatcatcctacaaagtggtgactaaaaaaaattataaacctcaaggtaccacctaatgaggcaaccagaagaggatggaacctccttatcgcccaggtttgaacctggatctgttctcccaatactggggggattttctttcagtgcacccaaaatggattctaaatcctttgagttacttttttcatttattttctaatcctttcatatgcagctgttttctcagatctgtggctcactctctgtgtgtctctgatattttacttttcatctttgtcaccgtttaataaaaatcttgttccataagtcccagatgaggttcggggacaggcaggggttctgagtgggtgggttagcctggcctgatgaggaggggagatgagaagcccctctgtagattttacttattttgccccctgcagcaggagacagcgcatgtacaggggagaaactagttcatgactgccaaaatagggaattgttttcagggacataaagactcagagacaccaggagaattcgtttttggggggctttccttgaggcaccctgctccctggggcccgtgttcaagtactgctcagaagccagcagtgagggataaggtgggctcatgtttcttcccttacaagtgagcataagaccccagaattcctaatcaggtgaaatcgggttgaagtgaatattaaggggaaacaccaagcaaaagagaagtcatgccagaggtgtctggcagtttggtgggctgggagatagaggcctctggcttcctttgtgagtgaagtgcctggaccatatgatatgtgtggatggtcacctcctctgagaaccttccgtgacttctagcatttgctccttggacacatgaagtgcttccctctgctggcattgattgtgctttcacactctgtttcatgtccttctctcttagtagcctggagggctcacggcaggtgttcccaggctgagcccataagaagtactcagtgtatgtctgcagacagaagcactattttccatgtatgtgagcactgtgtccttttaacagtcctttaaaatggttccttcgtctttgagtaagggccctggggatattctatttagggatgcctggcatgtaactctcgctgtcctcaattttgctgaagacccaaggtcacttgttgaggagcctctgggtgttggagaggcacacggccatgcaatgccctaaccctaggaggcaacagttactgccttagtgtcattccactgtgccaaaatccactctagatataacgaacattacagaagaagaaaccaacattttgtcattgcattactctctgcagaagtattcttacttgcttgtctacttataattctctactagtcacccaagagcctacagggcatagacatttgaagaccataactggaaagaacatagaaaacgtttcttggctttttgtcccttcatccacggttcagccagtgttgaatttgaagcgtctgttttttcctccctccctccccagtgcctgtgggtgacgaggcatctgtgatacacattgggggttgggatttttaccacatgtgtggttacccacatttcatttattacattctgagagcaccgtggccttgataatatacgtttctagactataattgcatattatttttctagcagttatcaggggtttcagctagcaattgaaacttgatagtgtcttggctcttcatctctggaacaatttatcctgatgttcaagtgcagagctgagcccatttcttataagccaagtagcacacacatggtaaaaccccaacttaagtgttctcagttcactctggaaatggagcatattcaggcctttggaaccacattctcagacctttcatatcccctttctccctcagtacaagtacaataaccaaacaactccttgcttccccagtgtggagaacttggcagttgctgagcatacctattccaattattcattccagaacttaagaaatgtccataggctgaggtgtgggacccactgggtccactgtgaggtggacctgaactaaaacttcatagatcaggccaggtgcggtggctcacacctgtaatcccaacactttgggaggccaaggtgggtgaatcacctgaggtcaagagttcgagaccagcctgaccaacatggagaaatcccttctctactaaaaatacaaaattagccaggcgtggtggcatatgcctgtaatcccagatactcgggaggctgaggcaggagaatcgcttgaggctgagagacggaggctgtggtgagctgagatcgcaccattgcactccagcctgggcaacaagagcgcaactccatgtcaaaaaacaaacaaacaaacaaacaaacaaacaaaaaacaaacttcatagatcacctggcctccataagtccctactaactgaggccacagtgatgttttgagtattctgaaattagtgttagttcagagccattgtccattagttcccaaaacatctcattattcctttttccccagtgcacagttaccctggtaaaaggttgtacataggtcttcttggggaaggctgggagaaagattaacagaatacatttctggcagtgtaccagggtcctatttcaaagtgacccagccttcctttcattctagttgagccagtgtaaactcactataaactgactctcaagtctgaggattggttgagggaccatgactgtttttatgattcatattagacttttgttcacttgacctagaacttttccacttatacacatcaagtagaaatttagtaggcttctcatctattcccacttttagaaacactatgatcatctagccaatagtatagccctgtgtgcaagttattcttttttaaattaattaatttttttttattttagagacagggtcttgctctgtcacccaggctggagtacagtggcatagtcataactcactgcagccttgaactcctgggctcaggccatcctctcacctcagcctcctaagtaactaggactatagacatgcaccaccatgcccggctaatctttttattttctgtagagatggggttttgctatgttgcccatgctggtctcaaactcctggcttcaagttaacctcctgctttggcctcccaaagcactggaattactggaaggagccactgcacctggccaaggtagactgttctgattgctgtgttgaccttgctgtccattaaggtaactatgccacactagaaagtgctcaatcaggctttgtgcctgttgcgaggcttggtcccatttgttcccttagacacttccctgagctgccttgtgggatccagacctacacagatccatgttgaaattaatcaccacccacttgctctgtgacttaggggaaatttattaagttctcatagcttccgtttcctcttgtatagatggaaatgatgccagtgtgtggttgtcaagataaaatgaaaaaatgtaatcaacaaacagcagaattctttggcctcggccggcatacagtagatgtgagagtatgtatgagttttgaacctcttctccaaaattctgtggccagaggccatcgcgggttgaaagggatggaattaggagacaccggtgagctcagagatgcaaagaaatttcacagcattttctgttgtttgcattaagacttaaatttcaagtttgctgtgttttccagtatcgcagtttgatttctggattttggtttttggtcggttcagagaaaataaggtctgtctgggagaagcgaccatttttatacttcccataccctctgaggagtgccttttgtgagccctatttgtggacttcattcattaactcattctttgggcacttgaggccaggaaatgacgatacatgtggagtgcctttgccctctgcaggggaagatgaggtcgcagtgggcacagctgtaacgcgtggctgatactctcatgcaggcagaaacccaggtggggatggcagaagaggcctgtgtcctgttggccaaaaatgtgcttcatggaaaatgatgttcctggtggagctcttcgggaactggtggtccagacattgaatttggaatcaataggccagagccctatttttggggctgaacctaactgttgtctgtgctctccgtcaatgccaaatttttctcagctatttataaatgtggagggagggtgctaggtgtgattgatggatcccaaacacaaatctgtaggtcagtcagctgcattcagaatcatctcagcagcttgcaaaaactagaatctgggatctcatcactagaaattctgattctggagtaatttcctaaaatctctatttatacaaagactctgcaccaggtaattgtagtctgaagcccccttagggatgccctgaatatcttctatgtccctcttccctctagttccattcctcatccttcacatcctaatgccatcttaaatgtctctttcagaaaaccttcttggcctctaactgagcagccctccatagaggattattagttcatgcctctgtgcaagaaagaaaaacaaaaacaaaatgcatgagttcattcactctcccatctcccctgctggcctgagagcacctgaacatagtgatggtactgtagccagtcatctgtgcatcctctgtgctctgcccactgcctggcatgtagaatatgcccagcaggggattttcagagctgaccagatgggagagtggtgaaactgaagatcagcccttttccctgcctgtaagcacctctaggaaaagatttaagagatgttgcaaacaaatcactccaacgtatttgggattgctcattgtgatgcctgatctgtgccagcctcttcctaccacatctatgactgttacaggggtaactgttccatcccttagtctgcagcacccggaatggatgtggaatcactgaaggaggtgagtggggaagaagacaagttggatcctgacagtttaaacccaggtgttttgcaaatccatcccttagtctgcagcacccggaatggatgtggaatcactgaaggaggtgggttggaaagaagacaagttggatcctgacagtttaaacccaggtgttttgcaaatccttccaaaatatcacttggcttttcctctccatacctcctcccttgcccagttggaaaaaataacaacaacaacaacaacaacaacaacaacaacctgcagtacgtgtgcccacatcctcctctggatgaaatagagttgcacagagaaaaggaaagttgatttcctagttattctcccacacatggagttctgggtggcaccatcccacactatttgcatcactgagctacacactctgccaagactgcatcttaaatttaaacacattttgatgaaaatagagaaaggctgaggaagaaaggttaacacttccccataagaggtgcgtaagcactatacatcgtatgtttttcttctggctcttggattaggacagaatgttaattaaaaagtaaaaagctgatcttctgagcagcaattaatttcaggattgctcttctttcatctgttgggtctttgcatttctgaagacgtggtggaaaatatttcctaggggtctttctaatacacattttcatttgattgttttgatctttaggctacatgttgacttaaaaaggaaccaatattacaaaaagaaatgtcattccaaggttctggattctgattatcgctctggtgacacagatgagattggctccaggcatatacacattggttagctggttctgcccaatccctgtctggagttgaatgttccatttagtcaagactgccaagcagcaacataactggattcattagcttgagttctgaaagctcctcttaaaagttgtttttgtattcatactactttaatatttagggacaggctgcaccattttctaggttgcaaaagtgatcactcagttttttttttattaggtgctattttagattcaaaaatattttattttttatgaactgttttgtgcctttgacctagttctcttttcactgggatatgtatcctaagaggatgaggtttatgatattaataatacctgcattattaattcctttcaaatgaaaccagctgtctctgttcccctccaacgtgtgtgtgcacacacagacacacacacacacacacacacacacacacaccccaagcatacatccttcatgtagataaaaagataaaatgcctttggggtatctatggggataacttatttttctcccctattgatcagaatgcatggaggcctgggaaactctgctggagtacccaaagcctccaagctggcagacttgagcactattgtctttattgcttcttttagcaggattttcctggggatggtgaatgtgccataaagtagggcccacaggccttgcagaaatggaagagcatgccattcactgaagaaatgagctgtcagctcccttctcctcttactataatttgctacagcctggaaatgaaaagtgacagctattaaaagggcttgggaataattgcagttaaaagcaaaaatagcgatattatccactgccacttaggctcacttttacttttgaaaaggctcaatgtttggagtccataaaatgtttgcagaatatcatcctgagtcattttatttatgactaatctaaaatatttttataggttttcagccatcccatagtggtgttggttttggtggcatctgaaggagggtgatattcctatcagagtgatctgtgacacgttgcagtgttggtcactgctgacccagactgaggtgacaggattcttccatgcagagctgcaagagttctaaagcaagtgtttttcctggagggagagcaatggctttttgtgaattttagttttagaatttgaaaaagtcttagcctgaaacatatctttaaaaatgcctcctcatatctcagctaacgtagcacatcacagagatgtcactgtattctggaagttgatgtcattctttctttggaaagccatagagtcatctccgcaccttctgtgatctctgatgttcagatgtttagcctagaaactagatttgaatctcgtttctaaagaagacccccttgtggtctgaactactgtattgtcttagggggctcaggttagtgtttgcaaaggttagtttgtgatttttttctttttttcgggaaaaaagacgtagaatctttttagcagaaggatcttggataaaaatcctgagtaaatgtttctcggtgtatggcattgaaaatgagttaggtataatgctggcttttagggaatatttaaatagttttttattcattttcatgtgtcttggaaaaagaataacaaggatatccaacctgtgatttcctagatttccttgtttaggatgagactaacatgcaataattgtaagagaaatactgagtaaaatagggctgggaaatggtctttgaagaactagagtttgggaaacactgatgtaagccaaaaacctggattttgtctgtgacacttctgaggcgagacaaggactgacttgccagagtttacctgttggtgaccttgagactggaatccaaacgagatgctggtatgtttgtgaataataacaaggagagctgacctttacagagcgtctcttgtgagtggtaccaagtgatttatatatgttatctcatttagttctcacttcaggccttttttgaattaattactactagtattttattttatagcaaatacaagatgggtgtggtggctcacacctgtaacccagcactttgagaggccaagtagggcggatcgcctgaggtcaggagttcgagaccagcctggccaacgtggtgaaaccctgtctcctactaaaaatacaaaaattagctgggcttggtggcgggcatctataatcccagctactttggaggctgaggcaggagaatcgcttgagcccaggaagcagaggttgcagtgacccaagattgtgccactgtactccagcctgggtgacagaatgagactccatctcagtaaaaaaaaaaaaaaaaaaaaaaaaaagaaagaaaaaaagagggagagagagagagagaactctaagtttagagaggctgggtaacttgcccagggccatagagccagaaagagctgaggtgaaggaaggagcacacctctgtccatcttagctccctgagaatagttcacatcaaagaagatgttgaagaatggatccttttgttggtgttaaactgctaggcatgagggtccagagtcttgttctggagacttgcaaatgatgatttttatagcctcattggagtgggggactctgcctaggacatcccctgagaagttctcagtatatcagcgtattacagttggagaagactcaagtagaaatcagctttcttttgtaatattgatggttttcaaattcagccacaggttccctttttctccaataaaacccatgacattttgcagaaccaatactctgtggagcacttatttggggaacctaacgttttaaactcattttacacatgggaaatctgacgtttgtgattacttggccaaagccaaaactagctgttggcagagcttatgtcattaattaatttattcattcaacggatagacatccagtgcctcccatgtgccaagcatgctgggaattagtggtacagcattgaaccagtggacaagacacagatataaggagacacatgtaaataattctcgataactatcatgatgcactgaatgtttgtgcccacacccccacgcctccaaattcttatgttgaaatcctcatacctaatatgatggtattagaaagtggggtctttgggagggccttaggtcctgagggtggagccctctggcattagtgcccttataaaaaggacccaagagagctctctgctgctctttctgccacgtgagacataacgggaagttgtcagtccacagcccagaagagcaccctcaccagaacccaaccctgctggcaccctgatctcacattttcagcctctagaactatgagaagtaaatttctgttgttaataagccacctagtctatggtactttgttagagcatcctgaattgactaagaaaaccataaatctatgaagactggaaaccctagcatttcctgggtcttcttaaggcagagggcttgcctttttcatctttcatctttgttttcccagtttctagtatgaggcagtgataacacagcctcaataaatattcgttgaataagctgttgatggattggaatctttcccattctataacaaaatggtttattattattattattattaaaaatatataataattattagttttggtgtgggttactctttgggaagtttaaaacaaaatgttccaagaggtccccagattgaaataggtctcttggtcacccttgctaagaaacccagttctgaacagcattgaccttgaacactcattacaggacagattatttgtgaaatgagtaatgtttgaaaatcatctctgtaggtttttcggcattgctaaattgtgtcattggttggaattttcagatcacaaccatattttgattcccaggcttttggccattttgctaatgtgccagaatctctaaggcctagcccaattgctaatattgacaaattcttgaggagtatatatggtttgttcaggaataaaacggataggactcagaatcttatcagctcatacctgtaggtatggggcaatccatccatctagcaattttctaaactatgtagcctactgtgggatactgaatccctgcccatgagtactgagaaggactcatggaaggatgatagctttctttgcattatttgtttctagcataggaaaactggctaatgttcgtacagtatgagaagtttttagtccactggactggagattcggagctgcccaggtggtcagtgctggcaggaaaaggtaaagaagatcaaagcatatggcttttctactttgcctatctttttcttgaaagaatttatggctgatgaagaccattttgctctggaggaaatgatgatctgttggtggcatgcacctggcctcttagtttgctttgttgtcctgggaagtgggcaagtgccccactggaccttgatctgcattccacaggggactccctgctttagagggacccctacccatgaggtccaaggatgaccacccagcgtagcccccagcaagtactcacacacacttcctccagagcagatcatttagtttaagggaagggcatcatcactttcagagatgggtgttttagtgattagacatgcgacttctctggtagagggcatttattttttaaaaaagagaaagggtaatgaatcggacactatctgtcaaattctttgctaggagtggaaacctaagttttcccaagtccgtatttccctgagaagaaattgattttggtatgatccataaagccttgtacagtgaaataaactattggcagaaaagagacaaacacatatataaaaaaaataagaatcaatgtttcaaaaatgaaatacagtagaatactgtgaggtgtttgtttgtttgtttgtttgtttgttttctttgagacagggtctggctctgtcacccgggctggagtgcagtggcaagatctcagctcactgcaacctccgcctcccgggttcaagcgattctcctgcctcagcctcccgaatagctgggattacaggcagccaccgctgcgcctggctaatttttgtatttttagtagagatgggctttcaccatgttggccaggctggtctcaaactcctgacctcaggtgatcctcccagcttggcctcccaaattgctggggttacaggtgtaagccaccacgcccggccaactgtgagttttatttagcctcagaagtatctttagacattaggtaaagagacacagacttaatcatgtctgtagtttactgcaggttataagatgaatgtctgatgaaattatgacatatgttactgaagggaaattgtgccatgtttttccctatatattttagggtgataacctgtaacacagaagacactggtgcctcactaagagcatggcaccaggagcctgaaggagtgggacctgagtcccattttcttggtttaccagataggaaaatttaaacaagttatgtaatgcttctgaatctcaattccccatctgtaaaatgagggtaacaatacagacctctagagtttgctgtgcagacttaacaggcttggctcatgggctgcggccaataaatggtagcttttgttatgaactctaggtagaaaagtatctaaatggttttccccaagcccagagagtctgaaatggcctttggaggtatcttcagacatcatgacttcttttagtgtggcatcatgcttgtctgatttttagatttccaaagaagtcttgtagtgcatcatgactagaaaacattttggagtttacacaatcagtaaatgagttttaaaacgcttttttttctaaataggaaggcaagtgttgcctgcttcatctatttgtagacctgtttaagtgttttaaaatccatcaaaacatttaaaattatgaaagccatttgcttcatgacttaacaaaattccttaaaagtcttgtatattcctgcgaatagctgaatcctctaagagaagcaggaaaaccacacgagcttctctattaatgttgctgatgtgttgtgacttgtaccaggtcccttaggccaaagcgaagcacagattttttgggggaaaaaagctgatgaattaagccaataactccgacctcttggccagagaaatgtaaattctttttctaaactcacagaaataagactcttccagggctggaaaagactttgatgaataacgcaggctcatttccccattgaatttattcctcgatgctatgcatataatgggtagtcaataaatattgtttgcccgctttttgtagctgtttcaaattgggatgaggatgagtctgtggtgttgaaatagaggaaagctaattttcttatcctgggataggctttaatcttgttagccagatgttctaaacatgagagctaaccagtcagatgagaccacaaatatctgagttgcacaatgcaattggcttgagaactgcattctttaaaggtcatcctttgtatggggacagaggcaccccttgtctacattttgggaggataggttggcttcctggtcccactcaggtcagaaacaccactgcccatcacttttggccccagcttcttgtggttcagtcccactgcattgtaaactccaagcagaggggccagttttgaccaatgaaaatggttaacccttttggccagccctcttctgccgaagtctataatgcatggctgtttttatccctgtctgttggaagaatattcagaaatccattgcaatctagttttgataaagcctttaattttccaccccttccttttgcaacttcatccatgtgctgcatattcagcccctaagaacccaggaatgaattgatgtgctgccttcaaaacagcctggcgtttaggagttgtgattatattcgagaatctccaggcttgactgttcttagctttgatatcatgaggactatcctcacagggaaagatttatagcatctggggtgagaactttaatcgtggcccaaaggaacttgtgatattttgataaggggcttgaggaagttgttggatatagagcagaatgtatttcggaagggtgcaagcaattttgagcccttctggctgatcattgcaaaatgggtgagcactgggagatcagaaaatatgtggtgggcaaggtagaaagaacgtcaaactggatgaaataagaaaacgggggaaagctatttgagaggaaacttggcatatacttagtatttgtgtctgtttttctcttgaaatgggctgttgtgttggcagaggcttctggctgctgtcagagatatgaacatctgtgctcctttgcagaaaactcaggattctaaagtgtttggtggaaattgtttaactctgccacttgctccatctcctcattaggaagaggttagtctgtactgctcagagtgtgcttttaagaggaagatgtggcttagggttctgggcttcacttttacatactgcatggcagaagcaggtttgcagcagtgaaatctgaggccatcagatacaagtgtgtagacttggtgtaaatcagtttgcttgcttgggttggaagtaagaatgaaagatgccaaattagtaaggcagttgtgatacaggcatccgaagagagccagcaagatggacaggtcacgtgtggctaagttttggaaggctttgctttagtcactgtagttaatgctaaaagctgttataaatgaccccaaaatatcagtgacaatacaataagagtgaagtatttgatcactttaaaatgcattctcctattcccctaattaattctgctgttcaccaagtcttctaacaaagtggtcagtggagttacacggggcatcagtgtctagccagcatgccaccttcctttagccaaaacctaatcccagctgtggcacacgcaggaaaggccaggcaatgtagtttagctctgtgcttgtggaaagtgtcactggtttatcgagcacagcctcaaatgttcttcctagacagtgatggatccatccacattttgtggagccccctttatgaaaataacacaaaatcaggtacaaaagtgaatggtttatttagaatgagaatgggcagggcttagtcaagtggaaggctctgaagattacggtttcttagcttcatggtaatatatctctgctcctaatgtccaaatataaaatgtgtttttccccttcttactacctaataaaaccatctttgctaggtgacccatggagcacttcgtgctgttgaagtgtgccagggcagcttattttcacattgcccttggagtgaacagtgctgcagccttgctgggaggccatttggctattggtactgagagcacaagactcgtcctgtgctttgactcaggggccttacctctcagcctctgaaagcccccagtgatttgtattaggtatgtgtaaatcgtgaaaacatcctccttctccaaagaccggtaaatggttgaattatatcaccatgcaatggaatattgcagcaattacaaatgatgataggatgttttgtgcaagggaaaatgcatataagtgaaaacagcatgatgtgaaatagtgtgaactcaattgtgtaaaaataagtaaactaaaaattactgaaataaatgatatgaaaatgttgccactggtcatctctggatgatacacatatgaccaaactttattcatctttatagtacttttttcttcaactccatttccctgcatttacaatacagaccaggcacacacacagggcctgggctgaggtgcacatggtataggtttactctgcttcctctttctctgcttcagtcagtgtaagaagacagccttggtaagcaccaggaggcctcatctttatagttttctgcatctagcaaattgtatacaattatttaaatagtgatagttctgacacctctatgtaaatggcaatattgcagccttaatttgccctaacattttactgtttccaaagtgttatcacatattatcatatctaattttacaacaaccctgagaggacaacaaagaaaaaaatcatacatttttagtagaaaacagattaaacaaaacaaacccatccaatcacaaacggcccatgaatatattgacatttccagatagcatctccatcttcttcctcctgttctcctaattaattctgctgttcaccaagtactctaacaaaggtaaaaaatactactttcttctcaattatcatagccttctatttagatttttaattacaaatattttaagagtattattttgggttttctccgagcttggaaacctagccttgttctaccagaaaatgctttctgcatttcagctaaggcatttagaagtccacattgggtcagagcctgcctgcatcctgagcggctgtttctgttctccctgccagcatcctcctctgcgggctcagtcctggggggtaggagtggggttatgggggagtctctaggaccctgggacccaacactggagagatctcaatcacgctgggtgctcttcttccctcgactcatgttccgtagctgcttagtcttgttgcgagtacccgactcctagcctctgcagcaccctgagagctgggcacttgactcttaccatccccatctcgcctcactgccccttcactgcagaagctgcagtttgcctcccacgcttaacctgatgactgacacctccttataatacctgcgagatgacttctgtgattctgcctgcccgcatctgtgtgtttctggattttccatctccacgcttggccctgcctgagacttctgcaggtcagcatctgaccgaggttatctgagctgactctgacgcatccatggtgttgctattcaccagatacagagttgcactggcacagcacagtcccttcccactactgaagctctttctccttgccagaggtcttgctcaccccaggggcctgggcagatccagttccagattctggaatctccctacgggccttaccttattgcaatgtactgggccaggccaccagatattgcactttgaaaatctgttttgaagttgctaactgcttggagtactgtggtgctgcaggctgctgtcaggggtagaggtatggggagcagagatgcctgagctgatctagaaaatacttaggggtagaatgctctaatgtgaaaattaattttaaaaaacacactgttaaagacagttcaaaatgtgctgcactttctatctgtagcaatctcaagtccagaaaaagaaggtggaatgaaaattttggtttctgtctcttagcagataggtcaggtcaagtggaaagaaaatggaggcaggaaagagtagctggggagagcctgcaatgttgagtttgtttcctggggctcccttaacatcttttgatgaactgggtggcttaaaaccatgcagatttgttctctcacagctctagaaactagcagtccaaaatcaaggagttggcctgaaggttccaggggagggtctttccttgccccttccagcttctggtggccccaggtggtccttggcttgtgcagtatcactccaagctgtgcctccatcttcatatggctgccttcttgtgtgtctgtttttgcatgacgttttcctcttttgtttttgagacagagtcttgctctgtcatccaggctggagtgcaatggtgccgtctcgactcactgcaacctctgcctcacaggttcaagcgattctcctgcctcagcctcccgagtagctgggactacaggtgtgtgccaccacacccagctaatttttgcttgtgtgtgtgtgtgtgtgtgtgtgacggagtcttactctgtctcccaggctggagtgcagtggcgtgatcttggctcattgcaagctccgcctcctgggttcatgccattctcctgcctcagcctcccgagtagctgggactacaagcgcccaccaccatgcccagctaattttgtttttgtatttttagtagaggcagggtttcaccgtgttagccagatggtctcgatctgctgacctcgtgatcctcccacctcggcctccgaaagtgctgggattacaggcgtaagacaccgcgcctggccaatttttgcatttttttagtagacatcttcctctttttataaagataacagtcctagtgggttagcacctgcccaaatgacctcgttttaacttgattatgtctgcagagacctatttccaaataaggtcacattcacagatagcaggaaaggacttcaacgtgtctttctcaggggacgcctttccatgcataacagctgcctctggtccagtctttctatcccctcttcagtggtgtgtccaccagcaaaacttctgtgcctcagtttccttggctgtaaaacggtgccctcttctaggatcgttgagagaattaaatgaaatcatgcttggcagagtatcacgctcatagaaagtgctcagtaggggtttagcttttacagctagttgcttgcagtcatttgatttcataagctaggtttgtggagaaactgaggaagtgaatgagccaaacacaaaagtaaacactgttgataggacaggtggttaactctttcagtgccacaaaacacattctgactcacctgcacacaaattttgcttacaagattgttgtcagcactaattttgctccaagtatttgcttgattaaaatctcttatgctactctttgcagctgacctataacagaaataaatgaactaactagagatactttcttcgttgggcttccatctagagctaagctttacttaggctttcaaattgtaagcaaatgcaaaataactctcttgggaaaattccagagaatctaggccttgagctgttgtaagcaaatgtggccctccttttagggcgggaatctaagaaatggagattatgcattatccagttccaggggcatcattcatactgtggtctgtgcgtgtgcatggacaagcctgctcctctgggtgaggtggccataggtcctttctggggttcagtaagttctgatagtggcattgtcatggtgtgaaacctctcattctcccagtttaattattcagtgagaatgggattcctgagattctaaaccatattccataactttggaaaatatatgtgtatataaaattttccatacggttaaaacctgagagtggactgcaagtcaaattgctattttcttccctgcttcgtctttgtgaacttcgtattgtcagttttcctgacagttgacaaaagtgggcagttttggtggcatatctgatttaggaagtaagtgcaacaatttgaaagcctaagtaaagcttagctttagatggaagcccaataaaggagttatctctagttagttcatttatttctgttgtaggtcagccgcaaatctgaaaacacaggtttgaatttgtatgctcatttaatgttactgataatctgaaatgctggtttttaggactgtagatttcattatggaatatgtttttaacttaatttgtacatgggtctcttgttgttttgggaattttgttctaagacatgttgaagctgtgctgtagttattgggtttatgagttgttggggtattatttatttttaatgtactctgttccttcctcttcccaaagcaaataatcaagaattaatgtttaactttaagttggatccactcactttatattgagagttattattactttaattcacgtttcttttccctgaagccctgatatatctttgggaagatacattttttcatgcattaattattttcttttccagtatcaattgcagatattacaatcacagcaagaaacatctgttgtacctttattatgtgccaggtactgtgctgcctgctttatatgaattattattacgatcattaaatttttatatccacgctagactttacatactgtctatcataactcacattttataataaggacttgagactggggaaataaacttgccaagtcgacacaatttaaaagtggtagagccaagagttgaactcacgtagtctctgactctggaactatgctcttaaaccctacactcttgatgttgaagatgtagggacatctttgcatttgaagacagaaatgcacatacagcccagaacttttcagtgattccaaagacctctgtattttcacgtaacataactttggaagccacagattcgctttgctcaatctattttgttcaggagtacatgcatgctaatttgctcaggcagtagctgaaagcagtgagagatattccaacaaggctccagattgcaagagaaatgagtgtggatttaaaaattaacaggctttgtatgcatataactaagaatcagcttacttgccatgaagatgagtaccaaggccccaaagtatgtatgtcagaaggtaggatattacttggttttgtgtaattggtaataccaaggtcaaatcaacttagataactggtttaaaccattaaatagcttttttggctttagatatttctcaagatttttactgcaagctacgtgcattgcagtctgcaggaagaaaaaaaaggattattagtgtttttgcaatgttcctgcccagcgtttacttctttatttgctcttgttttattcccacagggaaaggttcattgtaacatacccagggatgtgtggtagatttttccaatgcagcaggtagaatgactttgatggtaagaaacagaaaattgaatgccgactggcttaaacaataaaagcttatatcattgaaaagattagaggtatggtgagttacagaattagattgattcagccactctctgggtcatttagggtttctttttttctgtctctgccaaacaggattggactttggagttggccacagggcagattcccccaacacaccagcagggtggcgatcagagaatgccagaacaaacattagataatttttaagaagagtgacttggtgtatgtgtgccccaacaagtatccaccatagccagtgacctggatatgcttaatttagattaatgaatttatccgtcctctctcttctccaccttgtaggtgttaatattctacatgtaatgtacaggggttttccccctcggatatttttggtgaatatttctgtagttgtccctaaacatagaaagattttccagcaggatactaagaggtactgtttagcatatttcaatttcccattaccaatcccacagacctgataagatatggatgttggctgctaatatcaaataatgttttctaattttcttagtggaaaatgaatggaatgaatcattcaaatgaattccatgattcattatggaatcattcactcaatattattttgatattaaatgatattaattatattaaaatattattttgatattaaagtggaggtaaattgacttctgtcatataccttttcactttgctacttcacagtttccctctgttcttgccatgctgaagtggcctggtgtggtggctaacatccctaatcccagcactctgggagggcgaggcaggcagatcacttgagaccaggagttccagaccagaataggcaacgtgacaaaaccccatctctactaaaaatacaaaaattagccagacgtggtggtgtgcgcctgtaatccccgctatttgggcggcggaggcacaagaattgcttgaacccaggaggcagaggttgcagtgagctgagatcacgccactgcactgtagcctgagtgacagagcaagactctgtctcccccacaactgcccccaaaaaaggaaagtgctgaagggtgttttcctgagtgacatgctggaactttagatggcaagaaaaagagagctaagggcatactttgcatgttacctggatgctcatttttggccaaggggatttcttctgagaagtgaaaaatatcttcagacagtttggttcatttggtgattgtcctgcttgccaggttgtaccaactggtattttcttcttttgttcagtaaatcaaccaaaagcccactatgtgtaaggtattttctgtggattcaaagttgaacaagacttccttagccttcctggtctttcagtctggtcagggagatgagacagacacacaaataaccacaatacaaaggacgaagaggaaagctaggcttggaaaaagggctgttgggcttggaggaggcaaggaaagattcctggagagatgaggaaagtcttgtgtgcaaggggaagggagaagagggaggatttcagacagagcaagtattaagaatcttgagcctaaatgttgtgaagcagttaaaattaaaaaaaacaaaaaaaaaatttggtcaagttatgtctcctattagtgacttattattgtttaacaaatcaccacaaaacttagtggcttgacccaacaagaataatttattctctttcataattttagtggttgaggaacccaggagcagcttagccaggtggttctggctaagggtcctttgtgaagtggtggtcagatgtcagctggggctgcagtcatctgaaggctggactggggctggaggacttgttccaagatgatgtgctcctgtggctgacaagctgctgctggctgtggatgtctcttagggctgcttgagtgtccttatgacatggggtctggcctcccccagagtgaaagtttcagggagagacaatcatgtggcatcttttttctctgacctagcctttgaaatcacatagcatagcttcccacacactctgcgtgttagagaggagtcactaaggtgggtctaggggaagagggttcaccttttaaggggaggagcatccaaggatatgcacccatgttttaaaaccaatacaattcttgaaaaaaaatgacaagctaaaatgatggttgcattagtttttctttagttgttgtgtctgcacagtgtttaactacagtagttggcacactgtagttttttgattggtaaactatggtatatatgatgtcttcatctgttaaactagtcatttaaagtagaaattggcaatttatccaagagacatcttaccacagaagcctcctatagaagacagataaagtagaagtcaggggctcaggctgaggtggtggtgaagggggctggcacagcctttcctcagtgtccaggaggaccccacaaacgccctggctcctgagaatagaactctctggaagccatttcatggacccatccattccttcctgtgatttttttcttttggagttcagttgttcctttgaagaaagaacaaaaggatttcatgttgttttgcaaaatataattgtaagaattattttctgaattataaacacatagtttgaatgatgatgtgtagcactgaatgatggttagaataatttcttccaaaacattttgtgtgtgtgtgtttttgtgtgtgtgtgagagagagcagaggtaggaagtagttgagcgtgaggaagggactttaatttgaacagaattttctcctctgtggagcatattaattaaatatgtacttgtactgaaccataacactgtgtttaaagcagtgaaagacatgagccaccattctcagcagtatcaaagctgaagccctccatgaccatgtgatctgacatgacgttcctgctggagtgggaggcagagttctgagaagtggagaatgtgatgcttctgaattaagtgtctttgataattaccagaataacggaaaaagtttatgaaccagatcaggaaaaaatatgctcattagtcatatgaatattagttttctcaacataacaatacacttctgaggctcccccttcttccttggccccgcacacacacaaaaatgccatttctgtggactgtatggccatttctgtagactgtatgaaaagggaccctctaatacaatagagaagttggaaaagctgaatacattctctctctctaacttagcacacttaaagggcaatagccagaaaattaaattttatttaaagaattttgaggatgaaaagcacgaggatattaatttttctccactgtcactttccactttcatcactgctacaatttattgtacccacttgttcctggaaaagaaagagcataatagcttgttacagtgatttcgttttaaaataaagtgttgtaggatgttgaaaaactagaagaaaccaacggctagcggtaaatgaaagagagggaactttgtttgctaagatgtggacagggaataatattgctccttgaatttatccactaacaatccagtattaatatctgtgggacttcccatttagaatattggtaaggtagaattagttgctacatctccataattatttcttaaaatggttttctgagaaccaggaaaatgttatactacttcttgttcctacttcctgttcttgctgttccgggttttattatgaaaatgtgtaagtgggagtaaaagccaaactcttacttagcagagtgcctggtgtgcagtaaacattaattctcttcctcctctatcctgatgccttctgcactgaccccaggatccacagagggagggtgacaaaaagtgtcacagcatatagctcatgaattgcatccttttctttagttagctaaaaactctttccactcatgtcttcttccctttgcagtttttttctccaacaggaaacccactgttttttgtttctctaccaaaatgtgtcaggttgccttcctttaggggtaggccagcaggctctatgatgggccctagtttttctcattgtattagttttcccttgtttgaatggagaaagtgattagaaatctggattactgttcatttcattttcatccatgtatgtcatttattcattcatttgttcattataacatttgtagaagacccactgtgtagggctgtgtgtgtgttaaggggtgggaggggctagagcagaaggttactggaactgaggcatctggccctctgtccctgctttttagtggctcacagtatggggttgtggggagggttggagagaaagacatgaagacaagtagatacatttcaaataagcatttactgaacccttgctgtgatcaaggaactgaattaaattttatgtggataccaggttttactaaacttgtttttttctttcaaggagattatactttagtagaggagagaagacacatctaatttagcaaaactttagggagctttctatgtgtcagtcaccaaactgcaatagtactggggagttcattttttttcatgtcaattacataaaataatcctgcctatgcaaagaagttagagactctctgagctagagcaattacagcaggaattgtaaaggaagtcggaagcaaaatagtcatagtagttaagggttctgacttgggagtcagatatatctggttttggatcctggcttcgttgcttaatagctatgtgactttgcgggaaggagggagataattaccttttcaagattcagttttcctgcttgcaaaatggggattataatgataatatttactgtggtagattgtattgtccaaaatggtcatgccagtatcttttatcatacatgatcttacaatatccctgtgaaactcctgccatctagcaatagggtttatgttccttccatttgatcttgagtggaatgttgtgacagctttgaccaacagagcatagcagaagtgatactatatggcttgcaaggctacatcataaaaatgttattcacctccatcttgctctgcagtgtagctcttggaacccagccaccatgctgtgaagaagcccaaacagcccgtggagagtcccaagtgggaggaattgaggcctctggcccacgggcctggctgagttcccatctaacaattagcctcaactttccagccatatgagtgaccatcttacaagtggatcccccagcaagccccagttgagttgccctggctgactgtgcatggagcatagacaaaccatacttacccaaccctgcccaaatggtagtttcatgagaaaaatgaagtgattgttgttgtgtgaagccagtaagtctggagatagtttgttacacagcagtacacagccaggacacttgccatataaagttgctaagaggagtcgatgaaatgatacatataaatcagcataaaactagtgacccgttaatgatagctctcttcattattatcactagttaagggaagttatttaatagatgtcagcattagttcaaagtaaggtcagaacctaaaaagctacccacgaacttttggcatccagtaggttttaggaattttgttcacttttttttttttttcacttgcaaaactctgctgtgtgtcagcttccggatcacctttctgctgatattgtgctgagtttgttctgaactctgtgctttccgttgtttcagagtttcacttaggctttcggtgccatggcccgatgtgtaaacaatgtttaaacttccagattattctgtgaaagtcatgctcagggctgttattttattaaaacaatttttttgcatgtggtaaaaagcaacacaaaatttacaacttcaccatttgaagtatacagcacaatagcataaactatatgcacattcttacgcagcagatctctagagctttttcattgtgagtgactggaaatctatacccactgaaaaacgacttcccctttcccttctccccagcccctggcaactaccactgtattttatgtttctaagaggttgactactttaaataatccctagaagtataaccatgcagcatgggtctttttgtggccggcttacctcacttagcatcatgtcctcaaagtttatctgagttgtagcacatgacaagatctccttctgctttaggctgaataatattccattgcatgtatattcctaccgtttctttatcccttcatctattaatgaatatttagactgcttctccctcctggctattgtgactaacgctgcagtgtacacagtagtgccaatgttgctctgcggttattttttccacttcctaccaacagcagaatctcgttgaaatgcattggaaagacagagcgtaggggcttatctgagttctttgtcatcttttttccaatgtgtcttagacagtgatgcacaatcaggtagccagactgcccagattcttcctgggggtttcaacttcattatgtatatctattgtgtaaccggttgtgattagaattaaacctctgccaggctttctattgctttcagagcagtttcacaagcattattttattgaacccttgctgcatgatagctatttctttagtatggggaacacaaggttacaaatatagtgtggatataaaatccaatgctactgtatatgtttattgtggtattcaatgttctttaccaatgtaaaattcacttacagacttgacacaattttttgaagttactatttttaaaattaataaatattttaaaaattaatcaatttttttctaagagaaattttaggtttacagaaaaattgggcacaaagtacagtttccatatcctctctttccccagcagggcttccctcttattaacatttgttacaagcaatgagccaatattgatacattattattcattgaagttcatagtttgccttagggtttactttttgttttttacagttctatgagattgaacgaatgcataatgccgtttatccaccattattctgtcatacaaaagaattttactgtcctaaaaatcccctgcagtccacaaatgcatccctctctcactgcatattgctggcaactaccgatgtttttattgtctctatagttttgccttttccagaatgacatatagttggaatcagtctgtggcctttttaggctggcttccttcacttagaaatagcacttaagattcatccatgttcttttttttttttttttgagatggagtttcactctttcgcccaggctggaatgcagtggtgcagtctcagctcactgcaacctccgccttctggtttcaagtgattctcctgcctcagcctcctgtgtagctgggattacaggcacccaccatcacgcctggctaatttttgtatttttagtagagacggggtttcagcatgttggacgggctggtcttgaactcctgacctcgtgatctgcccacctcggcctcccaaagtgctaggattacagacgtgagccaccgcgccagaccctcatccatgttctttcatggcatgatagttcatttctttttatctcccaatactgtgtcattgtgtggatgtaccattgtttattcactcacctgttgaaggacatcttagttgcttctgagttttgtcaagtatatgttaggctactgtaaacatgcgtgcagattttgtatagctgtaagttttttcaacgctattataaattaccaaagtgttctccacacaggctatattaatttaccctccaattcagcagtgtatgtgattctgtttactacaaattcttactgacagttaatactgatgaattctttcatctttgcctatctgaagagtgaatgtgggtatctatcttactgttatattaatttatatttcctgattattagtgagtcataccattttaatcttggaaggacctttgagatcctctagctaatgctatattttaaagatgcaaaaaacaagactaagaatattttcttggcctggtgcgatggctcccgcctgtaatcccagcactttgggaggccgaggcgggcagatcacaaggtcaggagttcgagaccatcctgcctaacacggtgaaacccctcccccgtctctactaaaaaaaaaaatacaaaaaaattatccgggcgtgatggtagctgcctgtagtcccagctgcttgggaggctgagacaggacaatggtgtgaacccgggaggcggagcttgcagtgagccgagatcgcgccactgcactctagcctgggtgacagagcaagactctgtctcataaaaaaaaaaaattttcttacttcctcactttcatttttctttcctaagaatatgtttttagtttcattgcattatgcccctcattgttgtggctactgagttcagtgtctcatccaatggaaatctttcatatttgccatgagggtggaatatatacaaagagagaaaaaaaaaaaacaaaagagtaatattgcagatttctcccttgcaccaactgcagatttttcccttgtaccatctttattttcactaacaagaagcttctgtttcccaaactaattatacacagggcctgaaccagcgtgagtactcaagcattcccatgaatgatggaatgaaccctaagatgcaaggagtgggagatgaggtctgcttaacggcttgaaaatacccctagatcccagtggtatctcagctctgcagcttgagcttgacttctgattctgcctgtagctgcggtggactgggaattactgataagggaagcaagtgttgacattttccatattaggatgggttctccagtgaattctgacccatgctctcgtggtcagctctcttgaggccaactttccagaggctagctgttgggaccagcggagttgacctctggggcgggacagcatatgcactgtcctctgaggctagcaagttcaagacactctggtttcccctggaaagcctttggagtatcggaggaggattggctgggctgattcagccagtctgtattttaactgccagggaatgaataagcctatctttctgactccctccttcccattaacaagcccgacgccttgagtcccaggaagcatgccacacatgacttcagtgtcccgtgcacacagaagtttaattgctttgtgattgcctaaaatgtgaaatgaaggaacacattgcctataaggataacatttgcgattctgtgcatttcatttcatcacacatatttgtgtcagttaaagcacacggaagtgtgtttgctgtacttaaaagacctatctggattttgtgtttctccgtgatttggaagaataactgcagataagcaagctctgggtgtgacagacagacatgggggcagaggtgagacaaggtggagtctggggcgtggggagggggtcggaaacattgggcattccaggaggagggaacaatatgtgcaagggctgggacctgcaataaagcctgacctttttggaggaattcttagggttttttttccccattgttgttgttttggtcttgaagtataaaaagcatccatgccttattcttgggaaagattcattcagataaaatcccattgtcactcaaagttatgctttctcacacgaccatttcagtcccccagtgccggtggcccacattaccactgcttcattggtctggccacagtgacttctctcctggaaatgattgctcagcaaacgccttattctggcaaatttcagagcccatagttacaatgaggactcctgatcatgagctgtttgcattttattcagaaaaaaattaaaaatggggggaacaaagaggggaaaggatgtgagccaagcaatagctgaatgttttttaaaaactggatattttgtttttcatcaagtaacgattacccagttgcgaccacaatctatttagaactaaaaatttaagccagccttccaagccccaaagaaaactatggaaaaaaagatccaggaaacttttggtactggggtgtagtatctcctttttatgctaagtttgcaaaccttgctacattgccacaaagaggaggaacatctcaacactgattggcatctgggcctcgcagatggggtgtgtttctttaaacagtgtcttggttataggagaacctttattggaacaacctgaagggcccagggaatttattatataccaggttgttacttccgttaacatggagaagcatctaaaggatacattgtttgtcagatatgtcaatatcaaaggttaaaaatagcgtgggacctagggatgcaccagaaagctgtgccaatggcggggagtggccatgataggaccaaatgagaaagagcataagatacccatagaaatcatggcgcacagtcacctgtatgagacagcatgcagtgtgcatgggagaggcctgccacacggagtgaaggtggaagggggagccacctagacattcagagatgggtcttggtggtatgggagagggagtggaccagtgaggatggaaagtgctggcccaaaccttcccatgcataccttaaaatgaatttctttctggactgattagagagaaaaaatgattacaattttagggattctgtttcccacccctcattttctcttgctttttttccccattaatatattttattttttagaagtattagatttactgaaaaattgactagatagcacagtgagttccaatatatgcctgctatccacacagttttccctattatcagcatcttgcattagtgtggtacatttgttataattaaactagtatccattattatgaatgaacaacaacagttcattaagattcactttttgtgtcgtatgttctatgggttttgacaattgcataatgggctgggcatggtggctcatgcccgtaatcccagcactttgggaggctgaggtgagaggatcacttgaggcccggagttcgagaccagcctgggaaacatagtgagacccccatctctacaaagaataaaaaaaatagttgggtgtggtgatgtgtgcctgtagtccgagctactctggaggttgaggtgtgaggattgcttgaggccaggaggtcaaggctgcagtgagctgtgatcatgtcactgcactccagcctgggtgacagagtgagacccctgtcttaaagataaataaataaatgagaaagacagttgcaccgtgtcatgtagctactgttacaatatcatacagaataatttcactgccttaaaaatccacgatgcttcacctatgcacccccctaccgtcctcctggcctccaaacccctggaaaccagtgattttttttcagagttggggggatttcactgtgttgcccaggctggtctcaaaccttggcttccagtgatcctcctacctcaccctctcaaagtgttgggattacaggtgtgagccactgtgccaggcaaaccactgaactgttgactgtctttatagttttgccttttctagaatgttatataattggaatcatacaggtatttaggcttttcagactggcttccttcacttagaaatgtgcatttaaaacttatccatgtctttttgtggcctaatagctcattttaaaaattgctgagtaatattctattgtgtatctatactacagtttattcattcgtctatggaaggacatcacggttgcttgcaggttttggtaaataggaagaagaatgctctaaacatttgagtgcaggtttttgtatggacatacattttcaacttgtttgggtaaatacctagaagcattattgccagattgtatgacaagattacgtttaactctgtaagaaggtaccaaactatcttcaaaggtggttacatcattcccccttgcttttttattttccatgtgactgtagtttgggaacagaaattaaagataatatgtggaaaaatgcaggtactacttttaaggtgtaataccctgattctgaaatatccagagaagtgtgttctactgggtgagatacagactaacagtgtcctttagtataaggatattaattgtttacttaaccagaagtcagggatcagatggcttcagattcattaaatagctcaagactgtcctcaaggatccagactctctctccctctactcttccataagtatgttggctttctgtcttctgctcatacttcatggtcttaagatggcggctgtagcaccaggcatcaagttcccaaacacttaggaagaaagaggaaggggaaacaccaagagctatccttccattttgttccttttttcagaaaagtgaacacccctttaccccacgaaaaacccagcagattttctctgatgttttactgaccccaaatgggttctgtcgtcactctagctgcatagaggccaggaaacagtaatttagagtctctctaatttctgctcatggtttcttcctgtaacgatattctcactcacaacctggcctcatccatttatcaagcagaatattgctggagccacttgtaactttttgttgctgtaggggaggggaaatagcttcttcccactcatcaacaggttcatgactgaggcccctataacaaaagacagattgacaatagaaaaggatacacatgtatttgatgtaagttttacgtgccacaggagtcttcatagggaacgaaagacctgaagaagcgggtaaacctgtgtatttttatgcttaggtttggtgaagagtagacagtcttagagatgtatgattggacaaaggagctatctgtgatctaattgtaatgaactgtgagaaatttagcaaggcctgtttgatcaggttcttcttctcacttctatgtcttcaactcctttcctttgggtatagggaaggagtctctctcatatggcttgactgtgtgcccacccaaatctcatcttgaattgtagttcctataatccccacatgtcatgcgagggacctactaggaggtaattgaatcatggtggcagttaccctcatgctgttctcgtgatagtgagtgtattctcacaagatctgatggttttttaagggattctcccctgcttttgcctgaattcttctccttcatgccgccttgtgaagaaggatgtgtttgcttccccttctgccatgattataagtttcctgaggcctccttagccatgctgaactgtaagtcaattaaacttgtttcctttataaattacccagtcttgggtatgtcattatagcagtgtgagaacagactaatacactgtctcctgaggctcttataaagtgcttcaaagaaaagtcagaaaatccttcctcgattttatgatctgctttaggagaaaaggggtgaggggaaggtaagagtgaccttcctgcttctgctgttttctcaaatgccaaggtgccatgttttggggtggtaggtcctgaacccatcccttcaatgtccttattttatctgtgcatgagggctgaattattccatcactttcaaactgtgttttatggagccccatatttctgacatgagtgtaggcatctctgcagggagagtgaatgggatttgagagggcagggctctggcttcccacttcttcctggacaagcttaccttcacttacttaagcttcctcccagtgtagggttcctaggggttttcctttgaattaaacttctgcagataaaattaagggtgaaagcattcagtcaggcggatgtctctttcaattctaagagtcaaacttttggaccaagatgagacaaggctattagtcttgtcctaagtcctttgcaaaatccctaggattttttgccttgaaaactgtaccaaatacccatattgtgcacaggttggaagaaaattgttttgtcttctgtcctaaagaaaaaggaatttctttgccatttaaaaagcagtttaaatcctagctcttccttgtcaagttgatggtctggagcggggagataagaagatggccatcagtctaagtgttattcctaaaaagtagaagttttgatctttcctggtatctctaaatggaatttatcaaatattctggagtaactgaaaggggtgatctgtattctcttccaccgtttcctaaagctctcacatgtttatgtgaaatttgtggacttttcagatgggcatttaatatacgatatagtattaatttgggttggaaaatgttctgggcttttaaagtatatcttagttaaaatgctttgtaatttgcatatatgccctgaagtaattttatggaatagaaaaatacatgaaaacaaaaacagaaactaggtctgtgctgaatttgctgttgggtgaagctgactttttttttaaattttgaaataactccagtggcttcatggtccacacagcacattgtgatctatggacagtgtaccgatgcggattctgcctgcctgatcctggaaggcacactggctttccaggcttgttggtgcagtatttaaataaatgagccctgctgtgtgcgagacaaagggcctctgtactaactgagcatatgctatctgatgttctatatttacatgtgtcatctcatttacaatgtataactccctccaaaataagtgttatcccattttgctgtgaagacagtgacacatcaaacttgtaccatattaaatagctaggaagtgtcagagctggagctaaagtctcccagaagcttgtacatttgtcactaaatcagtagctctgcctcactaaaattaactggcattcttcacaaaaatgcagggggaaaggaactagtaaattttggaatgcatttttgtgccagataatttgcacatttcaagttgtttaatcctcacaacaatcctgggagaaggaggtttatgccgtgtgtggagcgggagctatagtattactcccacttcaagtcacgggaaattgaggattgaaattatacaggaaatggtcccttgaagatcatgtaatctcccctaaagatatagcagtaatgatgctgcagatgactttaggtggtggaacttctggcctctttaccaaaacagagtcactcagcgtattctgaatactggaggccgatgtcatgcattatccaaaagcatgttgcatgttgaatgttctacccgaagaataagatgaaaggttctgatttgcctccttctccatgtacttgacagcagctagtgggcaagtgcttggcttccccaccctgcgtgtgctgggctcgtgttgggctgaggtagaggaataacatgtgcctggtgcaaggtggctatgcccagggcttcctgagagtgggtttatgccctggccctggtagaatgcaaaattggtggtcccttcagcaagaactcactggcagaaaatccttacacaaaacctaaaacttaaattgatctgcaacaaaattgcccaggaacccactgcctccactccagtcccgggagagatttgctcccatctctgtctcccttctgcacgagtttgttgaatgaaggacgtggtcccagccctcatgggcatttcctggcagagcctgggcaggctatgacatcacagcagggggcagatcaaggaggagccagaacctggaacccctgtacctctggatccaggtggctcctggatgggaaggcagagactcagcaggagagtgaggatcgccattcacccaagaggcaggatgtggaatctgaccagagggctcagtgacaggtgccaggaaggcattggctcgttgggctggtacaggtacataaaagtacatatgggatactgctccatgccgcactaagctgtaataatgctcatggagctgggtttggcctgcaggaacagggtgccttgaaagaagccttcctgtgcttcttgggggcgaaggagggccccacattgtagatgcagacctggctcatgagtccagcaggggactgagtctagcagaagggtcaaagtgctgccccagctgaagttatccttctctccattttccgagaggaattaatgggtgttggtgcagcagaaaacttaggatgagacgatagcagcagtacacgtgagcagggggtgtcctcccatcccgcattctttcttgtgatttccctagggaaggaaacttcagcccgttagtttccttgcatagaaaggttgacttttgtttcaagtgtccaggaatctaacatcaggaagtaaatacaatcctggaaacaaagcagaaagataaacaaggttagtgaatccatcgctttctggttcctccctgagttgccttgtcttttttcttgaatggagcagtgaagagggcttcaaaagaaagacaatgcagtgattaattgaatgtttacatttccatgaatatatagattgggtttttgtttgaaggaaactttgatgtttttgaagataggaagggaaaataaaagttagtacatctttactagcatgttatgtgtcagggaggctctgtgctagagctctgtgagctcttttaattctcacaacagtcataatgaaatgtgtattattggccatcctttttaaaatttaaatttaaattttaaattctgggatacatgtgcaggtgtgcacgtttgttatataggtaaacgtgtgccatggtggtttgctgcacctatcaacccatcacctaggtattgagcccagcatgcagtagctatttttcctaatgctctccttccccatatcccacctgctgacaggtatgttgttgtgtgtgtttttcttctccctgtgtccatgtgttctcattgttcagctcccacttataagtgagaatatgcagtatttggttttctgttcctgtgttagtttgctgaggataatggcttccagctccatccatgttcctgcaaaggacataatctcattccttcttacggctgcatagtattccatggtgtatatgtactacattttctttatccagtcgatcgttgatgggcatttgggttggttccatgtctttgctattgtgaagagtgctgcagtgaacatatgcatgcatgtatttttgtaatagaatgatttatattcctttgggtatatacccagtaatggggttgctgggtcaaatggtatttctggttctagatctttgaggaatcgtattgtccatcttgatgaggaaactgaggtgcacagaggtgatgctgcccaaagggaaatcacagacaaatagatctgaggggtccagctgcatcttcacaggcatgctgtccataacgccttttgtgcatggatgctgcccaatggggctgtcttacagatgccttttatgacccatacctttaccctatgtattcctcatagagttggtccaaagataggcttgagccttctatcaattttctgtcaaacctttgagaactaagtatttctcttttgagcatgagatattttaagtgttgttattcaaaagagaagaaagggaaatgacaaataaaattaacaaagtctaatttgagaggtcatgaaaaaagtatttttaagttttttgtgggtcttatgttgttccttgctttgatatataagtaaattaaataaggttcagttgactatatattttgcagacattctaacctgttcattacagtttacgactgtggctgtctatattccagccagtttatttctttctgagaaaaattcctatcttcagtctacctcagtctctctttgggttcagctatcaggtagacaggtagtcctttataacataatatagtcatatttaatgttctttttcttagtgcaagcacttgatgctaccaattgtcctcttattactcctttgccaatgtcctatggaatttcatgtatagtaatttcagaatcactaatttctggctaacacttattgaactcctgtgatgcagtgtaaaggaaaaatatatgcatctaacacttggaaataggcaaataggcaaaagtataactgcatgtcccttcaatgtcatagtgaattattgtccccactcaagattatccaattctctaggggtaggtgcctttctctgctattctttaatttactgtttgctgttggttgggatattttacaatctataagggtaaatgaatacctatagaaaatggacagtgatgcaaaggattcctgtgtgatagcagtgtgaatgattcttgtccattagaaaagatagcccccaaattgccattttaatgccctataaagcattacctaggttttttatctacttcagcaatcttattttatcattcttttctttcagggactatattaatggctctgacatgcattatacattttttttgccttttttgttttgttttgtagagacggagtctcgctatgttgcccaggggtcttgaactcctggactcaagcaatcctcccatcttggcctcccagagtagtgggattacaggtgtcagccactgtgccaggctgctttatgcaatttaatcttcatataaatcctcttaggtgagcttatcattatgtctactgtgcttaggaagaaaggaggctcaaaggtgttcaagtggcctgatacaagatggatggctagtaatttagaaccaccaagagagcaaaggtttatctgaatcaaggtccactgttgattacactttgtgatgttaccatgaaaacccacattattctcaccaaggactgcaatgatgaagtgcagctgaggatgactcaataaggtgcacaaaagaatgtagattaataaaaggaagaaataagtaaaggcgaaaaagctgagactgcctacaaaaaactatgacactattgcattttttctcaccgttaatcaaaaataaagtgtacaaaatgtctgtgcacttgtttttattccttgtagcactacacagttttacttggaaagtccctatctcctacctcagccctgaatgtttgcttacagtgagtatatagagaagtggtttaaaataagaagtaacagaggtgcttgctttacattaacaaagcaaaacaaacaagatgttgagagagaagaagagccataattgcttctagactctaaccaaaccctgggttttcatcttccatcatgtaaatgtacagtttctaagttcagctttttattactgcagggtgttttcactttttctcaaggatctcatcaagttctgaaaacaaaattggttataacttactttccttaaaagtaaatatatcaagtgtgtcccatgaaattaagtcaatgatgggctgccccaattctagaattactggaaatgattagggaagcatacatacatggtaggtggcattgagagaggcaggatgaacaactcttttttttttttttttttttttttgagatggagtttcactcttgttgcccaggctgtagtgcaatggtgtgttctcagctcattgcaacctccgcctcccgggttcaagcaattctcctgcctcaccctcctgagtagccgggattacaggcatgcactactacgcccagctaattttgtattattttagtagagacggggtttctccatgttggtcaggctggtctcaaactcccgacctcaggtgatctgcctgcctcggcctcccatagtgctggggttacaggcatgagccaccgcacccagcctgggatgagcaactcttaaaacacagctctctctctctctttctagtactgcaaaactactcccagctatgcttatgataattactgcaggaggtaacactgggaactaaaatgtaattaaaatactcagccttccatgatattcatccatgactgcaaactttgaccttgaaacattccagtaatcaggataaatgaaaatttgctggggtctcaagtttaagatattgggaaattgttctcgtgtctggaggtgctgagttaccaacacctgctcttctcatctacatcctgatcaaagccacccccactgccatgcacttaacccagaagccccccaggccctcctgataactctcagcccttcacttctcacattgatgcaaaattctgcagatctggtgtttctgtggaatctggtctctgtttcctccacactgttcctgccctagatgaaccctcatcagcctctctgctctggaagacacttccattgtctcctcatgtatatgcttatgccccttgcttcccttctgttccccaattattctccttctgcagatgggttccttaggttgttgtaagaatgtcttcatgatcttggcacttggcttccaacccttcagagattcctgtttcttatcagcccaggtgtaggctcttgctgaccgtctgaggcctgtctgatccagctcctgtctcctcgttctctagtctcctcccacctgtcactcaacttagctcacagtctgactgaggtcctatttacagcttctttcaggtttctgaacatgccagactatgttgagctgctccttggtgctggactgcttccccctccacctggtcaagcatctccttctcactgctgtcctgtagctttctagtaagagtattctgtgagagaccattctctcctttggggcagggtattgtccaacattatattagtgtccctgggcctaacagggagaggctccccataaatataagtggcatgaatgaatgaatgaatgagtaaaaagggggttatttcttgcatcaaaaagttaaggcagcttacctctacttagctatggaaaaattgtgtgagtaggacttaaagtattctgctatttgtccacaaaccatatcatctctcctttccacctatttatcccatctagggggcagagcagggagcacttataccatacaaggcagagaagatacagatcaagatatgcccaaggcccttctagttcagcctctccttggagtaggtaggccaatctttatgggcttgtggggatctgagcataaaaaagcaagctgaggaacaaatgaacagtgattttggtttttggataaaccaaaaccaggcaccgcttgatagcaggcaagggaaaggctgcagcttcacttttctgtgatatttccaccaaaaatgcataacctgaatctaatcagtagcagcagcaccagacaaacccaaattgaggaacaaaataaccagtctatagtcttcaaaagggtcaagggcagaggaaaactgagggaagcactttagaatgaagagactgaagagacacaacagcttaaagcaatgtgtgattctgaattggattttttttaaataatgtactataaagtactattattgggacatttggtgaaataatttactataaagtacattatcgggacatttggtgaaatttgaacgaggtcacaagggcaaatagaatgtgtattaaatgttaattttctgatttgaatgcttgtgtggtggttatataggagaatgccattgtttgttggcaatcttcactaaggtattagtgggtggtgagccactgggttggcaagttactctcaagttgttcaggaagaatgaaatttatttatattatatctgcaattttttgtgaattggagattgcttcaaaataaaaatttttaagaaagaataaaaattaatgaacaagcttagacttttcctcgtggacaagttgcccaggagagatgttttgtattatgtcctgatggaaatgtgtgcagaagtggtcttggtagaccttggaatgagttgggggtggggaagtggtgaagccaaggggcacaaccaagagaaaacctgcatcctttctcagcaaccctcaggaggtggccttaagtgcaaacaggctcagaagacagcaggctccaggggagcacagttacctcccagggcagatgcaattagcaggtttttagtgactggggagccagaggccaatttgatgatttactgtaggaaatatcatcaagaccactggtactcagactagcagatttcctccctgtaggcagacgtcaagggaaggagttgtaatcaggagagcatttggtaaacatagaatcacagtgagaagagctagccagtgtgatcagaaagtccagaggcctccagagtcaggacagccccatctctccattctatagggaggcctcacacctggcagcagatgtggaagagagaggctagagtggggctgccctcccttgtatagagctggggtagcctagcagcgccaatttgctcagatttcatggttggccacctctgcttctgactgacgtgctcatgctttagatatgcgaatggcctcagctaggttgtccccaagttctgccaactgcaaagccccatggactctcgaatggctttgcagatctgggatcttgtgttccttctttctgggttggttttatacgttaactgtcagaggcatatgccactttattcaggttccttagagcttctccttgctaccctgtactgcctcagagaccactggccatgtgggcacttgagttagagatatgctgacctctagagtagcaacttccctctttctgttttgttttgtttcgaagtctggagccacatcagaggaaggaaagactttaaaaaaaaatgtttaccatcctggaatattttattatctctagagttctttaacttccccgggttgcagacttcctttcgaaatttagccagaatatctatatttctcatttgagaacagtgtgtctccctgctggaaactcaagttcttcaatttctgggtgcaaagtccacgcagggccattgcatgtgtgtggagattacagttctctttctacaactgaatgctttcttaggggggtacacacacttccctacaggctttgctgctctttcttgcacagatggccacttctcctgtaggccttctgggtacttagccctggaacctgtggtcccaaatcgttccttgtataaaagccagctcttccctggtgagtgttacatgggggcttgcccaaatcttgaagctcttgagtagcagaggctgtttctgaagaggttcctgaaatcaggaatgtggcatgcaagtcggcccccaactggggtctctggatggctcagtggctagagacccaccatgaaggtgtgggtccttccatgagtaacgaaggccgtgtgcacctcctggtataaactctgttttcttcaaagaatttttagagaggaagtacatatatagactggcttacactggtcgaacataagagtcctcaacttagtgtaattttatattttatattttgtcataatattataaggccttgcacacaaatgcctttataaataactacttctgggctgggtgcggtggctcatgcctgtaatgccagcacttcggggggccggggtggcagatcacttgaggtcaggagttcgagaccagcctgggcaacatggtgaaaccccatctctactaaaaatacaaaaattagccggacatgttggtgggcacctgtaattccagctactcaggaggctgaggcaggagaatcatttgagcccgggaggtggaggttgcagtgagctgagatcgagccaccacgctccagcctggacaatagagcaagactctgtctcaaaaatacaaaagaaagaaagaagtaaagaaagagcggtggggggaaagagggagggagagagggagggagggaggaaggaaggaaggaaggaaggaaggaaggaaggaaggaaggaaggaaggaagggactactttcccagaatatacctgatttgggcttgatgtgaacattgaaccacttccctctatcacatattcagttggggatgggaaacagtgtctacagggtcaccaggtcaatttggtgtcctgccccagccacctgtgtgccctggcagttgtctataaccagattgtcctctcatctaaaagtgcaaactcctgataagctcatggccctcaacacctggtggatagaagcaatagcatgggggctggggggtggtaagcacctataagtctcaaagagcggagccttggtttccatttgcaaacaaacccataagccctatatgaactctgacattagtctttgatatctgtttgatttttttactgggtcagggactgtgatgagtcctaacctaggggaccatgaaaaggattagaaatagaattactggaaacacatgctattcaaaacaggtagggcctgagtctgcttaggaacctgtagcttttgctttttttctgtccctgggcctctgtgcgtctgggagtcagaagaaaaaaaaaaggcagagtgtaataagaaatgtgctccttggggcaccctactgacctgtgtctttgtcagtcagatttcctacttgatgggaggagttctgccaccctccactctgcgagaccttcccttgcacagtgagtgcgggcttcatgtgaaaccgttcatactccatgcaagtggcgcaagcctgacagctgtgaagaaatgcttcttgggttcctgctcagttaaggggctgactttatgctcatagcgacagctgcaaaatacagatttagggtggaggcaccaggtctaaattccagttaccgtttgtgtttttaaaaagtctgcatttttacgtccatggtgcagttttacaacttgctgctgtgatagcctatacacagacatttcttgttcttttgatttttaaccaaatgatttctggaaccagagcatgggtgacttctcgggggatgaaagcgctagagaatctgaatttcaagaggtgggatagggaaggctatgagattttggaagttgggcaacatgggagagactgtgggaagcgtgcctttctgcttacggtgattaatttttgtttcaaagagcagctctccctaatgagggttgcacatgctggagaattagtaagaatctcgggggatgcccgtgcttcattctttacgcatacccctaggtagaggtggaagtatttggttcccctacactcctgacagcctatttcctatggttaaaggagaactggatttcccagcaaaagctgaatatcagggtctggagactcctgtgtctccctactacctgtgaccaagctattattcctgcctcttcatgctccacagtgtggcaggatggaaggtttgtcttctacctggacgattcgagactctcgcttgcctgaggtgttttagcagtggactgaagtgtacacatttcaggtgacaacttcattgcttccgctagaggaaatagacatactggtctacatgtgcatcaacacaatggagggaaaaacactcaactttttaaaatagacttttaaaaacattaccaagactgcttaacaaaaaatccttttgaacttggaaagtcctttcttccatacataaaggaaaggttttatgtggctgttttgcttaatgtgggctggttttattttggactctttgaaacccagcgtgaaggctaaaattctgctctgtggaaaagtcaaaatgaaaggaattgccgggtttgggttgtgctgaattaaagtgacaaggtacagataacagggcacagccatgcccacaaattagccctctctaatttgctgctgtggaaagtagtgctttggtgttgcattgttatttctttccttgaattaaagtttaaaaaagaaagcctagtttgctcaaaggaggaaaccggaaaaatgtaagcacttcagtattgaaatagcccatggttcccatgttcagggaattgtctgaggaagttctgcttcaaaaacatggaaattatgtggttttatttttagaagcctcacttctaaaatgtgtattggattattttgtgtgctacttaaagctatccctcccaaagctcttgttgacatgcagaacgtcttttgtgtgggtcaggtgacggcggtatttttattttaaaaacttttttagagacagggtctctctctattgcccaggctggagggaaatggcacaatcatagttcactgtaacctctatctcctgggctcaagagatctcctcctacctcagcctcccaaagcactgggagtataggcatgagccatgcccagctggtggcagtcttttgtgtgttttttttttttttgcacatgatgtgccctggcatcatggagtgactgcagcatctttctccaagatggtatggggatccagaaagacatttggttttcccagccagtgtgccctgctccaaattataatactcctttttcccaattacaacttcccagaaagctgaaatgtcattctttgaaatgtggtggtacatgattataatattaccaaaaaaaaaaaaattagttacataaattgtgtaataaatgtcaggattacttattacaacactgtacaaaaaaatgcagtattttggtcttggtaagtcttgttttgttcttagtatttgtgtatgttaactcaaggggagacctgttgtctctgtatcgagttgtctgctcctctggtggtgggcactttcacactcataggaggctttcattcatctgtctggataataatggctaatttcacactctgacttttaaggcattgtttctcaaagtgtattccacagattgttactagatggtgatgtttaaagggttccttgcactttgggaggctgaggctggaggattgcttggggccaggagttagagaccagcttgggcaggcaacatagggagatcccatctctacaaaaaaaatgtaaaaattggccaggcgtggtggcatgtacctgtagtcccagctacttgggaggctgaggcgggaggaactattgagcccagggggtcaaggctgcagtgtgctgtgattgtgccactgcacttcagcctgggtaacagagtaagggcctgtctcaaagtaaaataaagggtcccatggttgaataaatttgagagacactaggataaataaagcaaacagattgatttcctgaaggatttttctgagccttttctatacaaaagtacatcatgacttttcaggacagcgagtggaacagacatctggtttcccacaggagtaagttcctaagtgcctgctagggaaacactgcctcaaagtttggctctatatgcctgtctggagtgaattgtgtcccctacaaaaatggtatattcgagtactaaccccccaggcccttagaatgtttccttgtttggaaataggatggttttagatgcaattagctaagatgagatcatactggagtagggtcggcccctaatccaatatgactggtccttataaaaaggggacatttagagatagaagcacacacaagaagaacacagcatgaagattggagtgttgctgctataagccaaggaactaccagaagctaggagggaggcctgaaacagacgcttccctagtgctttcagagggagcagggctctgttgacatcttggccttgtaacttctagcctccacgactgtgagacagttagtgatgctttgttaaggcagcactcggaactaatccattggcactcttgggttgagtttagtacctcagacttcttttcaggataggccagggccatatcctttgtgctagaagctgcatactcaagtgcatctctggttctttcttttctgtgggtttattctttatgctatttgtgatgttttcactggggcctgcccttacttcccattgacctggaacagaggtttcttactcttgctatatattagagtcatctggggagcaggaacaaaacaaaacaaaactactgcctgggccttgctccaggccaattaattgagactctctgggagtgaagatcaaatattttattaaaaactctgagtcaattacaatgtgcatgcaaggctaataaccactgaaggaagcagacaccaggccgtgtgcagggaagggcttggggaggaggctccaaccaaaattcggcaggggatgggaggatctttgttgaaaccgagaactctcgggctgcacgcctgactgacatgagtttggaccctggatctctacttacccgacctgactgtggaccctggatctctacttacctgacacgagtgtggaccctgaatctttacttacctgaactgagtgtggaccctggatctctactaaacctgacctgagtgtggaccctggatctctacttaccttaccaggaccaggtgcaggtagtttagctgctctctcctgtggcgtcctgatttaacacttagggacaataacgactccctaggaaggctgtcgtgagggtctgtgggaggctctgtacaagggcagtgagtccagggctgtaaggactatggggagacagactggagacctgggctcccccctccagcccctgcccccttttctctgtggtctccctaggcaggaatcatctatctctgtcaccttctgcccattttccaaacctagtccttgattcctccctccagccctccctccccagctacctgctcaaaacaattgcaacatccgataggcttccaaatccaaggcgactttctggctgcacaccgtttcttcacaaagaaaacacatttgttgaggaagtatgctaattcctcaaggaaccagctccagggctgggcatgaaatcactgtggcttgcaccactgtgggttgcaggcacttccttaaaggtgaagtcattctgggtaaaaggcaggcaactaacacagcatctgaaagacagccctggagctctccggttgaggaggggcctagatcttggtaaaatttctggctcctgcctggatcacagtcagctgtggagcacataacactaggacttcctggggaattggcatctccggaagctgggcctggcactggtagtttccaatgttctccaggtggttcctcaaaagctctaggggcggttctgcctctgtgaaggcagattggccgccccttcgtattttgtgtgtgtgcatgcattttgccatgtgggaagctagcgctcgctcagctgttcactcaacaaatgcttattaggtgtcaatatctaccagaccctctcctagacacgggatacagtgggaaaccaaatactcatgcttgcatgaagcttcttttctattcagggatccagaaaataaacaagtaaacaaatgtctgagatgatttcagaccctgagaagtgccatcaagaaaataaaacaggggagtggagtgggaaggacagagagcaccattttagataggagccaaatcactcttctctaaggaggtgacatttgaatggaaaccggagtgaagaaagggagtgagccacagggcagttcgggaaatgttgtgggcagctgaacagccctgtgcttggcctgctggggaatagcagggccagtgtggctggaggggagggggagatggaatgaggaacagaaaaggggccagaggccagaccatagaggcagatggaccatagctggggcttcgaatgcttttctaaacgtgatagggtgccttcgaaggttttgagtagggcagccacatgacctgacttaggtctcaaatggatcattctagagcatcaactactgtgggcaagagtagagtcagagagatcagctagaggtggacttttcggcactgtccagggagcagctaggagaggtttatgcatatgtggcaggtaaaatattacagcgaggctttaaagtaattcctagacagtgtttacgattcttagaacttcaaagcaaagtatggaatatatactttttgcatattgtcaaataattctgcatcttttcaaatgtgatatttacagtgttacctgaacatggtcacaagctcaaacgaattcgtgtgcatttttactcatgtctttttttgtgtgtacaaccgttgctagttttattgcagattagagtgaaagaagtaatttgttgaggtcagatttctgaggcaacctctcaagtagatctagaacttactgttttcttgacaaataaacaaactggaaagttcttttttttttttttgagacggagtcttgctctttcgcccaggccggactgcagtggctctatctcggctcactgcaagctccgcctcccgggttcacgccactctcctgcctcagtctcccgagtggctgggactacaggcgcccaccaccgcgcccggctaattttttgtatttttagtagagacggggtttcaccttgttagccaggatggtcttgatctcctgacctcgtgatccgcccacctcggcctcccaaagtgctgggattacaggcgtgagccactgcgcctggcctgacaaataaacaaactggaaacttctaatttttcttcaatctaattattttgctcattcctgtttataaatgttgtgccttttctaatggtttgcactttttattgcatctataacacctcattaatcttgtttgagtccaggtaattacatgtgcatagtatcatcttaatcgtgtcatttgttttcagtctgtgttactaaaagaggtaataatctgtattatcaaaataggtatgactaaaatagaattcaatagactctctaagcaacatattctataccataagtaaaatatagaagccatcaaaacctgtatgtttcggccgggcacagtggctcacgtcctgtaatcccagcattctgggaggccgaggtgggtggatcacgaggtcaggagatcgagaccatcctggctaacacggtgaaaccccgtctctactaaaaatacaaaaaattagccgggcgcggtggcgggcgcttgtagtcccagctactcaggaggctgaggcaggagaatggcatgaaccggggatgcggagcttgcagtgagccgagatcgcgccactgcactccagcctgggcaacagagccaaactccatctcaaacaacaacaacaacaacaacaaaaagccctgtatatttcaaactttacctaaaacgtgtatccttttaaatgttgcctaaaataatctatgattagactcttttcccgtaacatagttacgacattaaaaggaaatgtgctagaaatattatacccaataatagaaggaataattaaatgggcagaacttaaagatgaatccccaaataaaatttccaaaaatgtaacaaaatatgtaagcagtagacacttatataagtgtgctcatttatgaaatgttttgaaatttttgtctcaaatgccgtgtaacataaatgacaagtaaaatttcattaactcaccaggaagataacaattttaaccaagtggtcaaagttaacgtctctgttaatgggacaaaccaactatatatgccctctgatatagcatcactcccgtgataggtctgccaaaaatgcataacctgactctcactgtgaggcgagatgttagataaacttttgtgattttttctgtactcttaaaaaatgtcagcgtcatgaaaggcaaagaaagaatgaagaactatcccaaactaaaggagattaaagacacagaaaaactcaatgccctaagcaatcttggattggcttttagtccagggaagcaaattcatttttcttttataataaaggacattattgggataattagtgaaatttaaagagggcctgtagattatataatagtgtgtatcaatgttaatttcctgattttgattattgtgctgtgattatctaaaagaatgttcttgttctttagaaatatacattgaagtatggaggggaaaagtggcatcacatctgcaacttactcataatacagttgaaggggaaggagaactattctgttgtctctaccctcctaggttctgggcctggggccctgcaaattagattgacaaaagacagattaacaagagatagcaaacagaagtttattagtacatgcagcatgcatacacctgggagaaactcagtgatgagtatctctgtggagtggttagaacttgggcttatctagtatcttaacaaagaaaaataaatttgcagagaagtgataagacaaaggaaaagggttttaggcttcccagggtggcagactgtgggaaagtaaatacgtggggaatactaatggcagataagggttaatttagtaaggtttgtttgtgcaggtccatcctgatgcagtctcatctcaggtgataaggttgttatccccttcctggtatgggatggtggggacacctttacaagaatttatcttctgctttcaggcagatagtgagagggccaagagcatgtcctgtttctgcttttaaaaaaattaccttcagctcaaaataattcttacgccaaagtggcgtatttttgaatggcatactctgaaccccttcacagttcagaaaaaaataatacaagaaaaagcgagataaagttactgtgataaaatgttactatttgggaaatacgggtgaagggtatactttacattcatcttggaatatttatgtatgtctgaaattattttgaatgattgactctaaactgggcttaggagaaaacattttattttctccaaaattgcagaacaccctctatcctagtggtttctaagtagtaggaaggaaacttttcttttttaaaggtaaggcaagtgtttctgagattgccttaaatgtatataaaatagctaaaatatttcaaaattatcttttatccagagagtcttgacataccagaagagtgagttagaatgaaatggaccagtaggaagtatttttctaatgtatagattgctgaattcttaaagaaaactactatataattttttttctttttctttttggctccttaggagtcaacttgaaagtatataatttaaaatattttattcccattgttcataaacttgcagagggatcctaacctttgttattgaatgtgttttagaagaggaaatgaaattttactaagaagtgagaaattcaccatagaaaggatttttggaatggtgggagtggtcaatcctggaaccctgttgaagactctctccatccctatggactgggaagaggtgtggacactggatttctcatgttctagagataaatttccctcgacattggtttgtggatggttcaagctttaactctgaaaatttttatttttccataagtttacatttatgttaatcttatggtctacattccatcatgaaaccacccattgttattgtaagtactctgggattgccttgtgaattgtcacttaagaggtagtagccagttcccagtggtttcactcttcattagtgcagggttgtatattactgactactttcgtacagaattaagtccacttcatgaagttctgcttctcaaactctgcctttggtactggaactttagtaaaccagtaatctagggggtttaaataattatggtcacccagattagagaaatggtactctgagaaaggttggttcttttcttagtaatagttgtcttatgaatgacacggactgtgaagttggacattatctgggatcagttctcactctacagcagctgggtaatcttagacaagctatctgtgctattggcagattctgtatttgagaatccagttacttgctagtatctatttgtaacccccaaatcagtgcttaaggcacttttgtggtcatttgtggatgagcagagcaatgaaaaatttgagttgcctgacgggcatgtttctagccctgtcttcttgtttcatgtctcatactgtaaacaagtactctttttgtggtctatttaatgccacgtttttcacatttttgtgctttctgttggtgatttagctttttaaaatggccctaagagtggtactggcgtgctatctaatgttcctaagcacaagaaggctgtatgtgccttatggaggaaatatgagtgttagatgagcttcgttcaggcatgagttacagtgctgttgtccatgggttcaaagttaataactcaataaaatgtatcaaagaaagtgtctttaaatagaaacacacataaaataaagttgcacattgatatgttgacaacgatgttgtgacattactctcagagggacctaactctgtattttccttcaggagcgatcatttagtgttggcaaattcagtgtttgtggtgactttatagaacacaactacttctgatagtgagaatgcattgtattcagtctttctgactatcagcttcggaaagtaacattgagacattatcagtcattatgccagggcaacacatgtaaacaaaggctatgtcaagcaaactgggtcatatggtcatcctatcccaggtaaaatggatattaaaatacctcctttcagtagcattcagcaaataattgtccatcccctatgtagccaggtactatactgggaaatgggtgtcagtgataaacaaaaccaacatgtgctctttctgcatggtgtgtatagtgtattggaataggaagacacaaaatgaataagcatacaaattatcatattgtctgtcattcaaaaagccaccaggatggctaaatagtagaaaggagagctttattagtaatatgggtttgcaagccaggaagaggaagtctgtacatggactgaaggtactctatcttggaagaggggaaggacagcttggattttatgcctcacagaattcatactacacaagagtcacgcatattcagcaggtttgggggaaatcctgtgcatattcatgagaggatccaagtgcatgcacaatgggtaaacatatatgcaacatacatcccacattcactttggggcatagttttagaattaaaacgaggtggaaaaggctctttacatccaaaggtgaactataggacacaaagacagtttgtgtgcatcctctataagctgctgaaactggcctaaggtctgcagtaccttatccaaaaagaatgtttgtgaggcccgtcctctgtccaatcagagttgcggtggcctgggttgtaaatcagatttaggagaagtctgatatctcctattgtttagaagtttagagccacaggaatttggaagtttgccatgccagctgggtcctgacacctcaatacataaaaatctttcttttcttaaccttagagtccatcttaattgataaaggggtatctgttttgatctctcagatcacaagttataaattatgaccagttctatgaagaaaaacaataagcttttattgacaagaagaagtatagaattgggaaggtggaatggtgaggcatgggaggcctctttgagaagatgaaatttaaagcaagatcagtagatgagcttcattttaccaggagaagagcttcccaggtggagaatgaggtagtctagagcctgaccccttcaaggaagatcttagtggctgaaaagtaatgaagaagaagaatgtgatgaggccgggcgcggtggctcacacctgttaatcccagcactttgggaggccgaggtgggtggatcacgaggtcaggagatcgagaccatcctggctaacatggtgaaaccccgtctctactgaaaatacaaaaaaattagccaggagtggtggtaggcgcctgtagtcccagctacttgggaggcggaggcaagagaatggcatgaacccgggaggcggagcttgcagtgagctgaggtcacgccactgcactccagcctgggcgacagagctagactccgtctaaaaaaaaaaaagaagaagaatgtgatgcaagataaagtcctgttaagaattctaggagcaatggggatccactgaaggattctgagcagggaagtaataagatattttacagttctctggagtgtatggaattggaagtggaaggaagagcaagtgaatgcaaaggaccagttacgaggctactgcaggagtccaagcaaaagtgatggtggcagtagcggtgaaaggagaagataggtttggaagagatactcacaaggtcggatctgttagttttgaatatgaatgtttaagataaaaaaaaaagatcaggaatgattttcaaattgtttgaacagaggtaccattttctgaaaggggaaatgttgaaggagaagtagatcttggggcacagagtcaagaatatagcaaattaaagttcatttacatagaagaccatctgtaaatattagttttttttttcgtttataccacggcagtaggaatttttaaaatgacatttgttccttttatctccctctttttctagagggagatttgtagattcgtgtttatcagagtccagatttggtaacccctctttctattttcgtatcagttttctggacattcttttgcatgcattaggtggacagtgagttaatactcatctcctcagttctacctctctccacaaacttctgtggttttcctggtgcaggtttcagatctgcttcaggatgccaggaagagagagaacggggagctttatctggtctagattcttgtacaggccacacagtaccccagcactggccttctgaggctacagctcttcagttcactcccaagctcagctgctgtcccagggcagagtccccatcccagcatggctgggaccatagaagcttcagtggcagccatgccatcagctggaccaacccatccatagggacctccggattttgtttctgaacttgggttgtacttctgacttctcctcccatctttgggaattgccttgggaagaaaacttttcttcttagggttgcatggtctgagggatgggggctgtgcattaactgtcaatagacagactaaaaggagaaaagacaaggtcgatttccatatgctgaagtactctttgatgagtgctacacagacaggtaaatttatataccaatttaacaaataagagtagtgcagagcttcagtggggaagtatagcaggccctgttgtgctttttgatgcttatggcaactgattttgtacttcctggtgccaaggcgctggcttctcccacatagcaaacagccttggaggagggggttcaatggtggctgaatttctcagaggttctgcttaaattcagaatactactttggtgggctgttaatcccttcagaccctaaatttgctttcctctctgaagaatcctggcccatcagagagtctaaattgaatgccaggagaaaagggctcctggaggtgtctcctatccacatgcaagtatatctaccttctccccagtgacctgctctgtctaccagagagcgttgagaggggtgaccgtcctctgttcacagaaaggtggtattccccattctacccttgttggtggtactggcgcattccatttacgtaactgtgtgaggccactgtgttgactcatccctgaacccagaagatctgcctcaagtgacttttcactttggctaccccgagacacatggcctggcaccttcactttcctgaaacttgtgagacataccacatcctatggttatagagatttttaactacagatggtccctgaattcaacttaagatttttgggggttcagtggtgcaaaagcaataagcattcggtagaaactgtacttcaaattttgaattttgatatttttctaagctagcaatatgtggcgtaatactctccaaaacttgcagtcagccatgagatcacatgattttgcccacctgtaggctaatgtaagtgttctgagctcctttaaagtagactaggctaagctataatgaatgtcctgtaggttaggtatattacatgcatatttcacttatgatcttttcaacttaacaggatataactccattgaaagtccaggagcattggtaatggattattaagggatgctgtgagttaccagttcacagatttcttgcaactttttaatctctgataaatgaaaatgttacactccagtgggttcttcttgcctgctacacagataaagccaaaacgctgagacggtggtgttgaaatagggaatgagtttagttatcacaaggcagccgagcaggaggacaggagatatttctcaaatctgcctctctgagagcttggaggctagcgtttttaaaggacaatttggtggtcaagaggctagggaatgagtgctgctgatcggttgtagatgaactcacaggagtgtcgaaaactgtcttcatgcgctgagtcagtttctgggtgggggttacagtactaattgagtcagttccttgagatgagtcaggtccctgaggtggtagtcggttcaccagaatgcaaaaaatctgaaacgtatctcaaagaccaatcttaggttttacaatcgtgatgttatctatgaaaacaattagcgaagttataaatcttttaacttctggcaacatgacttctgagcagtaagcaagctagggaacaatagctggttatcacttacctatgcaggtactcaggcccctcccatagttagctttgtctatgcccaggaatgaggaagggctgttcgaagcaagatggagtcaggtatgtcagatttctttcactgtcatagttttttgcaaagacaatttagaaaaatgtttaaaaacagtgggcactaggtcaggtctgtgatcaaaggtataattctataccttgctaactgaattggttcatcacttccttcaagagctgtaagaatcagtgttttttttgtttgtttgtttgttcatttttttaaagtttttttggctgtaagtttattcaatgtgaaataatcctctccagttttactgaggtggctgaccatgttcacaaccaaatcctcctctaaactggaattcagttgctgacccagccccagcctctactttcttgttggcaccaggaggcacagcagcactatgtctgcacgtatctctgttggcttcccctcttgtgagtcttgcaggttgctcagtctccagacctttaggccgaggcctgccagtctctggacggctgcagtgtacagtggcaggcacagtctccagggtcagatgaaggtaatcactgagatactggataccctcattggtaaggtaccagtagaagtgtctccaggcaaactgttccttcacacagcctcgggacttgagagactgcatggccttcatgacctgaaggttgggcacattcttgtctgccagctcctggtgcttaggcatgggggacatccttcttggccaccatgactccctccttaaaaaggagtttataaatggcaatctggttcttcttaggcatcaacatcttggtggctctggggtccggggccggggcttgaatcatacctgactccatcttgcttcgaacctcacgggctgactgcccttgctattcctgggcataaacaaggctatctatgggaggggcctgaattctgctaagacctgcataggtaagtgataaccagctgttgttccttagcttgcttactgctcaggagtcatgttgccagaatcaggtttttggttaggaaccatttaatatttgtttactagattacaaaaacagaaatattttctttttcttttttcagttaccaagtgtttagcaagggaaatgtaatctgctacaatatgattatgccttctcttgaacactgtgttgcttctagggagaggaaatactagaggaatcaggaagatgggaacaaagagcaaaaaattactttgtggagttaagagattttttctttcttttcttcttttttttgacagactcttgctctgtcacccaggctggagtgcagtggtgtgatctcagcccaccgcaacctccacctcctgggttcaagcaattctctgcctcagcctcccaagtagctgggattacaggcatgcatcaccacgcccggctaatttttgtatttttagtagagacgtagtttcaccatcttggctgcactgtcttgaattcctgacctcatgatccacccacctcagcctcccaaagtgctgagattacaggcgtgagccactgcgcccagccaagatatttatttatttatttatttattttgagatggagtctcgctctgttgcccaggctggagtgcagtgatgcaatcttggctcactgcaacctccggctcctgggttcaagtgattctcctgcctcagcctcccaagtagctgggactacaggtgcgtgccaccacacctggctaattttttgtatttttagtacagatggaatttcgccatagtagccaggatggtcttgatctcctgaccttgtgatccacccgcctcggcctcccaaagtgctgggattacaggcatgagccgccactcccggtgccaagggatttttttaaacgactaactaatgttcttttttatctggcaaccagtaatgatgcattggttatagcatatataggttttagcaagatttcaaaaaaattattaattctcggacaacatggagaaatgagagctggatgctaatatagttagacacgatggttgcataacaacagcaaaacctcagcctcccctctccttctctccctgtgggtacttgggtgaccctgagctgatgttcagctaggactcactggcatactggtgttagggccagcattcattccgatggatcattgtgcaccctgtattgttgttaaatattttaaatatgctctcagggtgtaataaactagagctcttgggaaaagcagaccaaagctgggccacagccacgttagctctctgggaacttcatgcatggtgcccacaccctacctctagttaaaatgagaaacaacaataaaataagtaacgaaatccaacactgtacattttccccataatgatgacttcaatatatctttagaaatattaagtaacaaattatgttttattttctcattgattgggtgctcctgctttgctggtgccttaaacatgagcctttgttgagctcagagtaggcctccctgaggcagcaggcaaaggagagaactgagaattaaggatttgttctgtttatattttgagcttccattggtagttgtattggtttaaagtgagtgcaaattgtttgcacagccattaagcgtttatgataatgtattgagttgtttaaaataaaagcactgctaaaattaaaaaattaaaatagcaccataaacaaataaggcttggattttttttttttttgagatggagtcttgctctatcatccaggctggagtgcagtgggatgatctcggctcaccacaacccccacctcctgggttcaaccttttctcctgcctcagcctcctgagtagctgggattacaggcatgtgccaccacacccagctaattttttttaatttttaatagagactgggtttcaacatattggccaggctggtctcaaactcccgacctcaggtgatctgcccgcctcaagctcccaaagtgctgggattaccggtgtgagccaccatgcctggccaccttgtaattcttttaatggaaaaataaagcaaaatactcaacagagagggatttactacagaagtgtaaattgattaaactaccgcttttgcatattggattggtgaaatgatttgcttttcactttaggttaagtgtgcctttcccagaaccgacctctgctagcgccgtcttcagtgttacacctgattccgtctcctgctgcaccatgaaatgctgactctcaaggcagacaatgggacaggatttcagacagaaccatttacctgcctgtgtgatgtttccctgtaggtgacacagcacgggtgccacttccgtaccagctgtggaagtctggctcttccctttagtagcctcaggatacagggctggttctggcttcatttaccatcattaagagcctgtctgactggaagagatgttatctcatgataattgttcccttctgctcattgccaggttggaaaaatagataatggtgaaaaagtatgttgagaagcaccaattgccagatcccctaatgagtgaggtattaatctagaaatatagtggaaaatttcctttaaatatgtaaactagactgaagggactggcagaaagtagggtgacagttgtttatgaaattattgcatttttattagtttgaaatacacttgcatatgtttctgttagccctggggaagagagaaaattttattagtgtaattcaaagttataaaaagcactcattattaaattgctataactttaaaaatgagatacgtaagttaggagggataaaaagataaatgcctggaaaattttattttgacctgcttgactttgtgaacttagaaaataataatgatcatttattgagcatgtagtatataccagggactcattgtaatcatttaatcatcacagcaaccctatgagttatagcagtattattcccattttacaaatggggaaactgaggcctgtcaaggttaaccgatttacccagaatcacctggctagttagtgctagatccagggttctagccctggccttctgacctcagaggttatggtcttcattcttcatattttaaatgcctcagtcacttaacttttttgggttagtttccttatttttaaaatgtgggggcaagactagattctttataataaattagagttttggaactgtgctatctttttttttttaactgaaactgagcagaggcaatgttcatcacatactcactgcaaaaggtcaagagaatgactaaatggtaattaccggcagtatttgtagcaatttaagtcatttcaggattttacctttgacagttattagttattagttttagtaacagggacactgagagaaggtatttcttggtctacatctcagttgcttcctgatttctctctgaaccaacctcccccaacccatctctccctggagctgccaaataatcacacctcaagcaacggaaatcggctgctcttcgcaactcatcaggggagtgatgactaaatgcaggggatgagtgagaagagggaattcaggcaacgattaagaagcaggccactaattaggagaaccaggagagactgctgttatcttgtgctattcaatctggaagttactaaactctaccttagtagaaaatgtgcgcctgacttctttaggaaagaaaagaaacgttcgttagcagatcctagattcctctagattgcttggagattcctaagacatagccaattgaaatatatatatatgtactttcatatttattactgaaggaacccccccattttgttactgtgcttaagtttggtgtttcacataagttttccgagtaaatgaaagctaaaactaaatagttcaaaatagattataatgaaatgttaaacctttattaagtatatgatacaagcaaatgatgctttagaacatctatgcattgtttagtgaagaattataagatgaagatccatgtacccatcatgcagcctaagaaatagaatgctagcaatacttttcaagcgtggatcccattctcttccctaactcaagtaaagattgctctgaatattttattagtaatctctttgttttattttagggttacacaaatacaaatgatttttttttgcaactttataaaaacggaatgattctaagtttttcagtggcttgttcagtattaacattgtttctgagattcaactatgagaatgtagttcacccatgtagatgtagttcatttttattcttcagagtatattccattttatgaatatgggacagttaattttttctcaggagagatagacatttgtttgtttccattttcttgctattaggaggatgttgtaaatatttttgtccatctctcttagtgtagatgagcaagagtttttccaggatatataccccaggagaggagatgctgtgttgaaggctacacacacctaaaattttactgggcaatgccaacttgtttccaaagtagttgtgccaactttaattctcaccaggagtacatgaaagttcctgttgctccacatacttgccaaaacttgggggctgtcagattatatacattttctagccttttgggtgtaaaatggtgtcagcttggcggggggtctctgcattcctctgattactaatgaggttgaccttctttttataggtttattgaccttcttgttttttcatgaaatgcctggatatgccttttgggttgcttgtccttttcatattgattcattggagttctttatatattttgtgtactaaatctttgttcattatcgatgtcactgtagaggcagaaatggggtgatcccttttctccccatcataagagtcatagcccacacctttataacaaaatatagatcaacaagagaaaaacgtaacaagttcattaatgtacttaaacacgggagccatacaaaacatatgaaaactcaagaaggaaccagatggttgatgcttaaatatactggggagaaggaggtggagagccgtaaatgaatgggccccaaaaaacacaccagtggtttgtaaatgattctctttggactctgaatgggacctaaggataaatagtagctgcagacaagttacaggaaggtaagggcagagccgcattgtgaacaaaggtcttattatgcagataacagtcttccaggtcttcacttggaattgccctcaggagagcagaggcggaggctgactgggcgtggtgtcctgagcatagagacttctagtctcttctctggtggttaatgtttcctggttatttaatgagattcctagggaaggagttttgaggcaattgcatttcttttagaagttttctcaatcagataagggaacttaaagagagagccagtcctggtgcttcgaatagtaaggaggatcagaaggagtagggagacgtcagagggagaccttgaggctgcttcattagttcagcatgtcaaagcaccatatttcagggcgttttctgagccccaccattgaagatatcttctctcaatatgtggtttctatttttttattaaaatttttttgttatattttttcttatcaaaccttttgataagcagaaattcttaattatattgtagatggattggtcagtctctttttttttttttttacattttgggctatatatagcttgcttaagaaatccttcttacccgttggttattaggatattcttgtatcctaagattttctgagatgtctgtttttctttttcattcaaatagttaatctctggaattgttttgtttaatgtggattgtaaagtagaggctgatttcattttgccccctacattgtcccaatgccacttattaaatacaggttgagtatccctaatctgaaaatccaaaatttgaaatgcttcaagatgcaaagctttttgagtgccgacatgacactcaaaggaaacgctcatggaagcatttcagatttcagatttttggattagggatgctcagccagtaggtataatgcaaatactacaaaacctgaaagaatctgaaatctgaaacacttctggtcccaagtatttcagatgagggattttcatcccttccatctcccccagccactggtctgcactgtcacttttggcacatatcaagcttccatatgagtgaaagtcctccagactataaatgttacataaccttgttgacatctttataatattgggctctcttaatcttaaactttatatgtttatccgtttattttggtgttctttaatgtttttcaataacttttattgctttatacagaaatatcttgtaaaatgccgagagggaaagcttctcccttcatctcctgaaggtttgctgaaaatatactgacaaaaggccaatgaaaaggagagaaaggcatacaatgtatttaatgtgcacaatgcagggaatcacatgagaatgatttaccaatagcccaatgtagtccagatgcttatatacccttctatatgtgggagagaggagacagagaatgtgcaaataagtaacaaagttcccctgagctctgagggaggtgtcaggaaggtgagggatggaacttcactgtgagcaaaggtcatcttatgcagataaagcctcccaggtaatctatgagagttgcccttaggagaatagatgaaaagcctgtccagatgtggtgatcttcttttcctgggtggttgatctttttgggctatttgatgagattcctagggagtggggtcttaagaaattccaaagagagtccctcccggttctttgggaaagaagatcagagacagggaggtggaagcaggtcagagagaaaccttggttctgaggcttatttctgaggcttttcacttttcaaagcacttagcatgccaaagctccgtattgtgatgaatcattttctgcactccaacactatcttcttgttttattattatcatgaaatgtatatttaagacatagttctttctgatgctttgttcctggtgtatagaaatgctaatcactttaatatattgatttatactcagaaaccttgataaagccttattaatcctaatagtttctgatagacaataatatcatctgaataatgaaaaatttgccaccccccttcttaaaatgtttagaatgagatttccagtacaatattgaatagaggcagtgatatttgacttccttgccttgtttttgattttaaaggaaaagtttgatggctcacagttgagcatgatgattgctatagactttctgtagatatcctttaggaaggaagctttctgccattcctaatttgcctacgttcctaagatgctttaaaaaattatgattgacttgtgtattggtcctgtttggcgatagcagaaaggagttacatttattatccgtgattgttttcgatgtctgccatggatattagtggggagggaaagataggaggaggtaatatatgcttattatatacttattttctgattgctttatatgctataaaataatttcatgcaaattacctcatttgggttattgtttccagtgtcttttgtttgtttgtttgtttgtttgtttctggtagggacttagaggattctgattccataactgtggctggtcttatgcccaccagtttttcctaccacacacgggtgatattcaatttgcactatgcttaattaacctattctttcttccttagtcttctctagtcttccatgtcacacacttagtgaattgtacctgtagcctgttatttttcactgtactcctgaagaattttcttaaagtaactaagaaatcaatggtgcccttccattctgatccttttcttccttcattcacttattcacttgccagatattcattgatagcatactatgtgaccacaggtaaaatggtgaagaaaacatccctgccctcatagagtttacactccagagtggaattaggacaataaacacatagaccggtgtgtaacattgcaaggtagtgatgcggtgagtaaaggagtgagtgggagagagaaagagagggagggattactgggaatgtgtgtgtgccaattttactggcattaggttacctaggaaaggcttccctgaggagatgacctttggtctgagtcccaaatacagtgagaaagtcagctgcgggaagttcaggaacagcagatgaatgacagtgtggtgtgtctggggaacttgaagaagtcaggtgtggtcaccagagagcaagacaggagaaactggtaggggacagagaaagagacagaggccaggaaatgctgggcttgcaacattctcattagagagattttgcttttattgatgtgatgaaactatgtaagtatattttagtagcacataatatctttgtttactttctcaaagaattcatcagtctgttatctgatttctgggaataagaacgcatcctgggcttcgctcttgtctcagaatctccaaactcagtgattgatgggaagaagcttcttgttaatatttttgaaatgaataaagaatctctctttctccgttagaggagttcggagaatgctattgctgaagttggcctggctcactgcaccatgttgggaggtgatgctacaggggggagattacagaggaataagccagcattgagtttcctttgtggtagaggctcattgtgtgaggacgggagattctcagtctgacttccttctccaggtagaaacatctaacttaaccaagtgtaaatgattcatgtgtgactccataactttgtcttgcttgtgctcctgttctaaactctaggtgttgggagattggaatggatctcattttgaactggatcttaacttctttgcttcaatcccctgttgataaaatgagattatacagcaatatttgctgaccttcctcacagagaccctacgtgtgatgaagtgatttacatgttgaaagggtggtttgttttcttaatatatgagaaatagttaatgctaaagtctgatataaaacgattattaataataatttttatttttactttatgtaatgtaatttaactctgaagaaaaaaatgctggatattcttttgagaccaccgaaaggatatggcgatagtttcttcctttgtcttgtagaagaatacatgctatagaaatcgaggagcaaaaatcagagcattctttctgaattttctttctcatcttttagcccctttgaatatggtgtgattttagaaacaacttagaatttagaaacaacttctaggtcattttaataaacttgggaacctccttggtggagaggtccctgtaagtggtgaatggaagtgaaatcttatcttgggcattcatctatcagatattttcttattaatgtagtggctgtactctttagtaggttctacaatacatattagccattttacattttcttacttgtgaaacttaaaaacactgcacacatttgatactacgacagtacaagagggagaatggcgcttatgataatactttactatgtctctgcctcgaaaaagtaaatagtgagttggaataattgtttaagtgactgaaagaaaggaacctactattcaggaaagaagacttttcagattgtctgcgttgattaatgcattggttagttcttcaactccccactttacctcagaagccacattttttcctgtgttgtcttcaccctgggtttgaacttctatgatggctgaaatcaaagttttggtcataagaaagaatgactgagatgagtagttggtgtttgagagctggtgctttgcccatgatgggtagaagaaggcttctcttctgctttttccagcgggagagcttcttcaggtccactgttgagcaggtgtcctgctacccgttctgttctgcagtgactttggtgttggcccacaccaactagagggagcttgggtacagggttgactctgtggagctcggaagctcctgggtccactcttatcttgcccatacttcagtaggatcccctgcagccagcctgggaattgatcggtgctcagcaaaacaacctcttttattttcagtgtccttttgaaagacccttctctctgtgaagtttcacagcctttgattgctgcaagaatttaggaccacatcatagaatttaaaacacaaagtggaaatgtggcctggtgttagaagttatttccgtaaggtggaatggctgtattttccattcggtgggaatggacaggaaaactgctgttgcatttccattctccgcaggctcagatggaaacgtgtgggggtgaggagctttctgtttgataaaagctaaaaagcccactcgcatttctaacctttcaagttatgacagtcattcacgactgtcaaatataatggcattttagacatcatccaggaatcgttaacaggttccaagtgccttggcacaaagagtttacaaaaacattctgagctttgttaagaagacacttctgacccaccttcaataggattcactttttgtgttatctttctatcaatggtaatagaaaagccgatatccttagttgtctggtacctgaaaaacaggatatatccacaaaagcacttgagtttgctctccttcctcaagcaaaacttgccaaattttaaaatggtgaaatgagaagaagaagaaatttggttttgagttgaattttccctatcttaattacagaaggtaagtattctgaaaaaaaaaaaaaaaattaagccagcattaaagcattaaagcatgccttctagaacctacaagttattttcctatgtgttaaaggttttgaaaacaagtgaagaagtctctttctcccattggatgaacatttaggtatttaggtgaaagcaaaaatgatcaagtgtgaataaaactcttcaggagatctctagtttaagaataaatatgtttcaatattcttgcttgttgtctgaaactgggaacaattttagtcatagatttaacatcatatttggcagaatacatatttggcagaatacactcaaccatgggagggtcccctgtgtctctctggagtctcattttatattaataaaggcatagatgaaaactgcttagagtctttggttctgaggtaaacactgattgaggattgaagtttggcctgctgacagcatggtcagcctttgcctgtatattggcccaggtatggggtatggtgttgggggtattgtctgacttctgtggggagaggactcctttatgtcagagaggcctaaggccctggcagagtgttagtcagaaatgaattgagagagggattcctgagggatttgcattagtcaaatgaagaagcatgggtgagagtgggtggtgttgcctgtggggggttagagtccttctaggcctagggtgtgattttctactgaactcttccctggcttctttggttttctagtcacttggtttaatttttctaccctgattcctaagccctggaggtgtcttccttctctttcaacttctaccaatgtttagatcttatggtcacgtgatttctgagaatttaacttcatagcttatcctcttgtcttctgactcaaaggcaagcacattcaagatttatttttccccttctagcaaaaaatgaaaggggagaagtgaaaggaggtaggtgtgctttagagtgatttcaagtagctgggcgtagaaagggaaaatggagaggaagagagactacatttcatcgtaggagcttggcatgtttgggcaactgagagagggctggagccactgatgtgggatggggataggagagaggaatgaggtgagggagagagagatggatggatgcgcgggatgaggtctggacagttgggccctggttagatcacacaggcctttgcgggccatgttaaagactttggatttgagcttgagagcagtggggagccattgaagggatttaaacagaggaggtgtttgaaagtctttgtggtttcgactttggtggctatgtagagaatagatctaagggctcttgcaagagcccaggtgggaaatgttggtttggcctagggaatgtttgtgagggttgagttggattggtggtggcctggacatggaggggagggagaaggagtgtgaaggactccttggtctggcacaagcacctgaagtcatcagagggccctgaagttgtcagagggccccgaagtcatcagaggaggctagttcatgctctgacaacagcatcttcaacatttcaggttactgcaacagagtttgctgtcttgcaaaatctgctctaagtccaagtgaccctccagggcagctgtcctcaaactcaatggtttagtctgccttccatatcagtacacgttctaccaaattcactgtggcaagggaagagagaacctggctctccagtgcctctgtcacttccactcacatgtctttagccacaagagtcatatgtatggctgtggccttatcctgcaagggggctagaagtgcagtcccctagagtgctcagaagaggggaagcaggaaatctggtgtaaaggtgtaccacaaagccattttctaatgtgaggaatctgaaggaaaaatagcttctggaggaaagagttcagtttttgatatgttaaatttgagatgcttgtgagatacctaagtagctatgtcaagtaggcagttggctatttgagggagggagggaagaaggaaggaaggaatgaaggaaggttggttggcttgggttcaggatatacatttaaaatgtatctatgggattggatgagactacctagaggcgatgcctggagaaagacaaggactcagaaatgagccctgtattagttagtctaggctaaactctgtcgtgggtccaagcaatcttaaaagtgctagtggcttatcacaggcttacccatgccagatgtccactgggggacagtgggtggccctgtcatattataactgtaccatctgagcagaaactttgtgttttgtgttcaatgtcttgtgctcaatacctagaagcatacctggtgggaggtagtacctggtaatacctggcacaaggatgtaacggagaaattatatatatatatatatcatatacatttctattgaggtacaataaaatcaattttcatttagtgatactgaccaatgtatgtagtcatgtaaccatcacaacacagtcaagaaacagaccattttacagctttattttattttttattttcttcatgctacctcgtataagagaaatagaccagtttcatcaccctgaaaagttcccttgtgcccccttgcagactctgcttccacctcacccctggtaacccctgataggctttctttttgtgtgtgtgactgggtctctgtctcccaggctggagtgtggtggtgcaacctctgctcactgcaacctccacctcctgggctcaagagatccttccacctcagcctcccaagtaggtgggacttacaggtgtgtgctaccacgcctggttaatttttttgtcttttttatagaaacagggtttccctgtgttgcccaggctggtctcgaactcctgagctcaagccatccgccggccttggcctcccaaagtgctgggattacgggcttgagccactgtgcccggatgatatgctatcaatgtaattttgccttttctagaattttctagaaatggaatcatatagtatgttgtcttttataactgacttcttttatttagcgtagagattggtatacattttctgtaaagactcagatggtaaatattttaggcttacaggcgggatggtctttgtaggatctacctactcagctctgctgttggtagtatgaaatgtgtactgaatgggtgtagctttgttccaataaaactttgactacaaaaatagggagagggccggatttggcccataagctagagtgtgccaatatctgatgcagcataattcactccggatttacttctattgttacatgtatcagcagtttattcttttttattgctgagtagtcttccattgtatggatgacgttttgtttattcatcgattgatggacatttgagttgttttgagcttttggcttttatgaataaagttgttatgaacattcatacacctatctttgttttcatttctcttaggtaaatccctaagagtagaattgctgtgtcatatgataaatatgtacttaatatttttaaaaatgtaccaaactgtttttcaaagtcttactatttatcagcaatgtgtgagaattctagttgttctaagtttttatcatcataatgagtgtgtactgaagtaaatacttattaatattcaaatgtcaatgggtgtaaatgaatcattgaaaatatgttgtgaatattgtccagtgtcactcatattttaatgtgaattttttacatgactcttattctcatagttttgccatatattattaaactattttctattctttaatcttaaggtttttataaaattttcctgagaacaatgtagacaccacctttgtagatggcagttaattcagtgttagacttactgataagggggcagagcgcaatttctctttacactttgcagttactgaaaaccacacaggccttactactcagttgggctgagtattgggttgaaatctttgaaatgtgagaagcctaatttaatctcacctctgaataggcagccactttagctcttcctgggtataccgaggactacccacaggcagattctggatttttctctaaaaagttatgcatctgttggacccctagagttttgtcttttaagtgtatggctgagctaatttttacctggaaaaactttatgtagatgtttgaaatgtcgaccttggtgtttttttttttttttaaaatttcagttaagtttcataaactttcattttaagccgtgttacttcccagtgaactctcttgcacctaagtgaattgatttgctatttaggttctttgccataataagctcattaaatgctggggcctgttaccaaaaagtgattctttcagttttgagtacttgttctgaggctgtactctgacagagcaagatgtcaattaagattattccttgttagtggaaataaaatcaccttatctgcttataaaagaatctctctgttctttctctaaggggagggagagtatattcaactcacacaaagtttatccattcatgaagtgaaaaggtaaaagcttagaggtcatgaaaagatccccgttttaccagaacggaaattatgatccgagccaggggtatttttccgcagagctgactctcagaggtagtatcaagttgcagcttctatcacagcatcaaaaatggagtctctgtggagcttgaaaatctcaggccataactgattcctgtccacagactcaaagtcagaagcaagttcaccgtgtcgcagtcagtattacacaagtacaaagtgaaaaggtgtgaccgtgatcaataatggaaaagtgcataaagcctttttcttccctgtgaaccagcctggatttggctttcagagtcagggataatgtgccacgctcttactcggtgccgggcactgttctaagccttgtgcatattaaggtccaaggaagtttagggtaatggttcagaacactgccttcggatgggctagattgctgactagccaaataagtgaccagtttcctcagtgactccatctacccatgtttagggtggggattatgatagcgcctttgtcacggggctgttgtgaggactgaatgtgttaatctatgtacactctttaatagggtacctggcacagggtaagttatataggtgtgttggctattactgtcattttagtactcatcctaagaaattgttgacataggtactgtggtttgctccattttacagatgagtaaactgaggcacagagaggaattttcccaaagccacaaggctaggaggtagtgaaactaggattagaatacagacagtcagagtccaatcagtggttgttaactgctgtactctgctgccttcctgcttattaggagaaaatggctgtgcatttttagatgtaatctgcagtaaagcagatagtcctgcaaggaaggagtaggaaggctgtatttggcactgacggcttggactttaccactggttcctccagatgagtctctacacccattgccttgatacaggtcaacaaattggcagagagtccatcttctatttggagtagtcctatctcagtaaatgacatcaccacctattctgttatagaagccataatcctggttcgtcaatgactccagcttctccctgtttgtctattatcaattgttttgattttttaaatagcttataaatccatcaccttttctgtctccacgaccactccagcccaagtcactgccatcagtcactttcttaccaacctaccccgtcatccttgccccatgccagtctgttcttcatgtaggcaaaggtaaaatgcaaatctggtcagcttgtgcccgggcttaacacattacctgcttttacattccagtccaggtctgtctgcctccaaagcctgttctcttttttttccccatatttcctctataaagtttgtaggagtttcaaatcaaggccgagaaaagtaagatttgaaaggctgagaaaagtaagattttttaggtgtccagtggaatctggttttctttgacctttctcatcaaattcacacctcagataactaggccccagaatctgtacccattaccagacctgtcagcagaactcaagtgttccagatgggtttataatatctggtatttttctgggcaataagatgcaagatggccttctctaatttttttcacaattgccttcatcagtctagctagggatttgtgtgtctgtatttgtgtacttgtttttattgtcattagtttggttttggcacaatagagtccttgtcaaagtggatattattagcaggttgagtttcaagtttgctagaactgaatgcagatacaaagcatttgaaattatcagtatactgttaatggaggctagaggagaaatcaaagtaaattttcagaagtatgaaattagcaaactgccaacacagggttggaagtttctctattttcctcttaccagcttttaatctggtaatttcccagggagtacagacaggctgtggggaagctctctgcccatgctaacttgaggggaaaatgagcattaaaaaaacaattcattcagaatgccctgggataccagtgagcagatcagcaaccctaggatgtaatcaataatattggctttcagaatagaaccacagaccactttccccccaaatatgcaccacagactgccattcagcacctcagatcttatttatctatgcatttgagcaggaacaagtctttttgttcttaagcatggcccactggctccactgtcatcttgatgtttgtgtgaaaagctctcacagtatggccgtatggccatgctgatagcatgtaccctgactgtgttttatcttaaaccaaactgcagcaaacatgtgaggcagctcagataaaaactagaaggaagagattttatcataaaatccagggagttttggcagagcctcctaaagtgaaagagatgagaaggaaaaaatctataggtttgtttgtcttactagtgagggtaggtttgtggctaataactagagagataaaatatctacagcactgaaaatgggggaaatttgttttttaactgcatctttcctgagaaacattctgaggttctgctgtttagagccatgataagacaaccctaggaatgaagctgagtaatcattatgtcttagtctccactaaaaccacagcttctggggggcagctgggctgaggtctcgccagcaaagctcattaggccccaggtggattatgcctactatagcagggaagggtgtgatacctgtgttcaaccatcatatgggccactgttgacactcctgaaaccaaagacaggttagcaagcgaaaagcataacacatttatttaatataagttttatataacatgggagcctttagaaacgaagaccaaaagccccagaaatgaagacccaaagccccagaaacaaagacccaaagccccataactattcttatgtttaggcttgataaagaatggacagccatatagaactatgattggacaaagggtgtgacctaatggcagtatgactgaggaggaacctcagcaagggctgttggttcagattcttattggtctgtctgtgtagcatgtcttcctcctggatatagggcaggactcctctggaaagagggtctttggggagaaggaagaaggaagagagtgaccttcctaggtttcatggtttactttggtggagataggttctagtttctatgacccactttgtggaagaggatttttttatttatttattatgcttttattaagaaatgcttaaaggattttgtgaatttgtcttcctatccattgatcatttttcttttcttttttttttttaattatactttaagttctgggatacatgtgcagaatgtgcaggtttgttacacaggtatacacatgccatggtggtttgctgctcccatcaacctgtcatctatattaggtatttctcgtaattccatccctcccctatcacacgggccccggtgtgtgatgttcccctccctgtgtccatgtgttctcattgttcaactcccacttatgagtgagaacatggggtgtttggttttctgttcctgtgttagtttgctgagaataatggtttccagcttcatccatgtccctgtaaaggacatgaactcattctttggagaaataggaatgcttttacactgttggtgggagtgtaaattagttcaaccactgtggaagacagtatggtgattcgtcaaggatctggagccagaaatatcatttgacccagcgatcccattactgagtatatacccaaaggactataaatcaatctactataaagacacatgcacgtgtatgtttattgtagcactgttcacaataacaaagacttggtaccaacccaaatgcccatcaatgatagactagataaagaaaatgtggcacatagacaccatggaattttgttttttatgagttgcttcagtggggaaagagagatgggagaaaggagagcagtagaggtcagagagaccttggttctgagaccttccagtcttctttagttcagagtactcagcatgccaaagctccatactttggggtattgattgttttctaagccctaacactaccctctgtctagttgctgggaggatcagacagaaaaggacagatgtcactctgcaaggctggaagaacatacagttggtgaagatgtgcagtaatagtggggcagatccccctctgtgcagaagctcccctgtgagccttcttaaagcactcagccacctcataactcaagatgacatccatttctccttgcggagaaaggatttagaacaagttgagtcctggtcacctttgtgttctcagagaactttcctggaggactagacctgtggtcaggagggaaaatggttctcttattttccatcagggcatctgctcaggcaattctctgtgacttcctgcctttgcaaatgtaggtcaatccttccagaatcttaccctaactttcccccctccgatttctgtcaacacaatcgttcacctagaatcttttctatgccctcaaaacttcaaatctaaaaactccctgaacttaaagcaaagttattatttcctttctagtgccatagctctttgtccaattcggttatgatgcttacagcaaaaggaattctcatgcagtgtggcttctgtgtgtttcatgagactggactacagatgtgtttcctcagtttcatttatccagctaccccatgtctggcaaatgataatcccaggtcaggcactactctaattgctttatagatattttatcttcataataatcccatgagaaaggtacctctgtcattccagtttcacagatgaggatactgagggtcacatgttgtctaatttgtccagagtcacagcgttttcaatgtgggtgaaccaggattaacacccaggccaacaactgaccccagagccctcataaaagtctgtgctcctctgggaataaggacgtcaggccgggagaaagagcctaatggtattccgtgagaggcggctatgcggcattgcattatgcatcagaatgactaattctgtgtacgagggttgtcaggtgaaacccagtggaggcacagcccagagttctgcaggggccttcgctggtaatctgatgcaatcaaatgttctaggggtggtagttagagctctgctgttgctggagagaggcccaagaaagaagtttcacatattgttttttgatcagcaggtttggaaactttgaatgtttggctcacaggatggtggaaatgctccagcacttcctgtggcttcgagtctggtttctgcgatagggaactgggctcgagccttgcctcctccactggggactgtctgcacacatcaccgagtgacaggcttgctgggaggaagggagcagccactggcattacaacagctgaaaaggaatttgaaaagcaaatatccagaaaaccagaacaagggaggaagtgtgtgcattagtttgcaaaatgatgaactttccagttgaaatgctgattcccaaagcgcaagagagcttggagtgaagggaagagagtgagtggctcagctcaggtctcatcttgtttttgaaagaatttttccaggaggaaaaggaatctggaataggccctcctctcacctctcagcagctccctttctatttctgtccagtgggaacaaatgaatagctgctgcttgaagaaatgccggaaggttttctgtgcaaggaattctggattttaaaaatgcatcactggcttgagtaatccttcacatttgtaattttaatctttgaatttggttttaaggaaagagtggttcatttattcattcacttgtctggaaaatattgagttgctctttaccatgctgtctgatcaggtctggaacaacagagatgagtaagatatgagtcctaccctcagagaactcatataaacaaataggataaggtgtggaaaagtgctctggtaggtcactgtaagcgcctaagaagacagattcagggcagttacttctagcacgggaggccgtgaggtcagggagatctttaagagaaactggtgcatgagattggcactgaaatctagatgggaatttttgaagcagacccaagggaaggaaaggacattggaggtagagagaacattctgaacaaagacagggtgaaagcgagaggtggagccgactgggcttctgggttgggtggggacttggagaacttttgtgtctcgctaaaggattgtaaatacaccaatcagcactctgtgtctagctaaaggtttgtaaacacgccagtcagcacaatgtcaaaacagacaaatgaacgctctgtaaaacggcccaatcagctctctgtaaaatgaaccaatcagcaggatgtgtgggtggggccagataagggaataaacgcaggtcacctgagccagtagcagcaacctgggtccccttccacgctgtggaatctttgtttttttttcactgctcgcaataaatcttgctgctgcttattatttgggtccgtgttacctttatgagctgtagcactcaccgcgaaggtttgcagcttcgctattcactcttgaagccagcgagaccacgaacccaccgggaggaagaaacaactccggacgcgccacctttaagagctgtaacactaacggtgaaagtctgcggtatcactcctgaagtcagggagaccacgaaccccccagaagaaactccggacgcatctgaacatctgaaggaacaaactctggacacaccatctttaagaactgaaacaccgcgacagttcgctgcttcattcttaaaggcagtgagaccgagaacgcaccaattctggacacaaaaggaccttagcaggctcaggaaatggcaagccatttatgaagagggaagagatagcaaacgttggtctcaagttctctagttctttacccagaccatagctggctgggggatgatcctgatttagtctggggggttcctttacgcattgccaccagcaggtgccgcaaatggaccattggcagtcttaaggtagaaccagttttccatgtcagacttacagagccattggatgtgcctggggtttggggagcagggactcgttgggtgggggaggatgcaccggtggtacctggatgcaggctgtgaaaagtttatatcctagaggtcccaagtcaccacagatttaaagcaggaagtgagatgttcaaatgatcacaaatacaagtattctgtttcttttactgttttatcttccgttgctttgcacagtagaagttgcagttaatagaagttttactgttctctgaattggaaagagttactcaaaagaattgggctactttcctggagacaagcccatagatgcaggtggtgataattcaatatgggactaacggaaagttttctctgccactttccattgcatttctggccaagactatttagcgattctttctgagaaaccgaggaggcaaatagtctcaaagtatgtcctatgagaaacgtgtgccgcaagatgtttcgttaaaaaaaaagttttctggacagatacatttgggaaatattatagattgcatatggacatttcacagaacacgtgttacgttaaagtccctgagaagtcctgcagtaaaggaaactttgaaaagaacggcgtagagcccagcacagtggctcatgcctgcaatcccagtactttgggaggctgcagcaagaagtatcctttgagctcaggagttcgagaccaggtaacataatgagacctcatctctattaaacaaaaaaatggcatagtggttacgaacatgagctatcaaatcagacatgtagatttcattctggctgggttccgtatgtggatgtgagactttgggcaagatatttaatgtctttacatcttggtttccttgtttataaaataggctagtaatggtaccttattcataaaattgtctctaaaagtatatagtaagtgaactagtaagttattagtggatattattctattcagttttttccaagaatcctgactctttatttttgcattgcatttataaataactcagagaagcggtgctgtgtgggaaatgctggagtgagactaactcttgcaatccatgcgtgacttctgatagcagtcccacagaggaaaggcaggccctaggtgctgagcgctacgtcacagatgtggacttgcagctatatgaagctctagaattggggagcaaaagaccatttcctcttgactgcaaggttagagtgtgtaacttcagtctgttttgccttccagtcatttaatgacaagtttggaactcagggcagtaaacagatatggttaggttgatatattaggagtttttcaattgtaagggacagaaacaactcaagctgatttagcgtaatgaggaatttattagtttgtctatctaggaaggatgttagggtagtacagagaactgaaggaaaagtgttaggaaactcaacagaaactgaacatagctaggccttctgtccttgttcccttttgaatgttttcctcttgacttgtctttgcttctccttgcctcattctttcctattgtggatgacctttccccatggagggagcatggctgcagacagcttcagcttcagcttcatccccagcagaaggcaagaactcctggtgatctacctgcctggtccctgcaaagtgctaggattacaggcgcaagccactgcgcccagctgacaaatttatgagatccttattaaggatatttatactaggttggatcacatttattgcaaattttttttcagattgttattcgtgtttaaattttttaaatactttaatatataaaaattacacatgggtcatgctaatcttctctgtattgttccagttttagtatatatgctgctgaagcgagcactgtctctaaatttttataaaggtttttggaattcagaagtttttaagcttgcttgtatcaaatcatcaggctcttctttgacgctttctgccttttgtgttttattagtttgctagggctgccataaaaaagtaccacagactggggtgcttaactaacagaaatgggttttctcactgttacggaggctagaagtcagagatcaaggtgttatcagtgttggttccttctgagggctttctccttggcttacagatggctgtcttctccctgtgttcttagatggtctcccctctgtaccttctgtgttcagatttcctcctcttaaaaggataacagacaaacatgctgtattagggcccggcctgaagacctaattttaacttacttctttcgaggtcctgtctccaaatacagctacattctgagctactgggggttaggatttgaacatacaaattttgagggggacacaattcacctgtaacagttctcatactaaagaggcctctatcaacctgagaggatttaaggatttgaaggaagtcatttaaactagttaagatttagtatcttcattaatttactgcaaataataacacctgtcactcagggctgtgaagaagagtgagtaaagtgcgtgtccacggtgcccagccccatgcctgctctaggcgcctgtctgccactccttctggcagctgtcccctagccttcatgatgtcaatgccagacactgggaaagcaaagacttttctctgcaagtttccgttatattgcaagccaaccgtagctaatagcacatttccccacctgtcaagtaaatgggctgaattgttgctgagattagcatacatggctagcgtgtacagaaaatgaaatactgagcctccacactggattccattctctgtttattctctttctgctgagtgcttgcatgttctgttctgaacacaccgtgttccctcatttctgaagccacaaacttcctcttaggccccgggctgtcttcagaatggccatcaggtccctgatacgggaacctgaaatgacacccccaccatatacccatccatccagaccctccagtgtagggcaggtggggggacatgtgcccaccactgctgctcccatgggaaacaaagactggcttcagcaaacctggacactcatacatcctgaataatgtcagctgaccacaccaccgacttcatgtattccttgacctagacactaaaggtattgagacaatttcagtctgtttggcataagaaggatggtagcacaaagaagagaagagcaaaacttttacccaaagcctatttcggtggccccttctgaggttcagtgtaccatgcagggcggtgttctcaaaagtgaagactaggccaggtgtggtggctcacgcctataatcccagcacttggggaggccgaggtgggcagatcacctgaggtcaggagttcgagaccagcctggccaacatggtgaaaccccatctctactaaaaatacaaaaattagccacgcaaggtggtgcctgcttgtaatcccaactactcgggaggctgaggcaggagaatcacttgaacccggggggcggaggttacagtgagctgagattgtgccactgcactccagcctgggtgacagagtgagacttcatctcaaaaaaagaaaaagaaaaaaaaagtgaagactagagggctccaggaagacagcagtgccaagagggaagggctgctttcagtgggtgatcctcctgaagccctttccctttctgcctaacctaatgcaaggggaaaatgtggtctatgtctttttctatcagagacaactcaacattaaaaatatgagatgaacagctccctttccactatccccatcatcattataaacccattatccatcatcagtagataatgacttagcgggacagaggacagcttttctggtgaggaaggaaggggctgaggagtggaagcagatcgtttctccagctgtttggtgtttctctcccattgatctgccctggcctccactggcccatctgttgggcttgtgagtgcagtaggggaggggacacacggttcaccagggcaagtgtgtttgtttccccaacacacagcttctacaggaatggccatacaggcttaatttttttctcagtagggtttactgtgcaacagaaagactacaaagagcattaaaaggttcaaagccattgcagtcacccaaaactaaaaaactatatgggaaattcagaaaaaacaacaaaaagtgatcaggtatttgggacctttgtggaaccgaaagaattaattaagctgtatggaaaaacctgtagagatgtaacagatctttaagagactacagcaagaggcatgttgaacttggggcatagaacaatgtgtagagagatgagtttctaggtgggagtcaaagcgatttctgtctgtcgtcttcaaaatgccacccaacctacggagacatttagtggaagagtgggcttgttcacgggttatagagtcagatgttactgctatacagacttcagtacctaactctagaagaagtgattcctctttatttaatccactcaactataaacacaccacttaacatgcatatcgaggtgatagaatcttaatattaaacatggaacaattcccatatttttggaatggaataaagtcaagccagcaggcaagcaggaacggtatagcattctctgcccattctttacccaccacctgggatttgatagtgactttggaaggcatgatgattagaatgtctagccacctgcctagacttcccttttgtttctccctttaatggttcttaaattttagtttgtataagaattattgtacccggctgtctacacaacttcttgtagctggtattttactgggcaatttaagtaatactaggttatctactttggtaattttgataacactaggctcagtactgctggtagctctaatgagatgttcattgaggaggggatgcattcatacaacagctatgtattaaaatgcctgcctgccgcggccctgagtctgtaactgtgaatgcgatgtggaccttgcccttagagtactccagatgtagtggggagaagttgacaaagggagtctagtaaccccagagttatgctgggggaagcataggacaccaggatgctgactttgttggctgaagattttagaatgtatttccttctcagttatgcctcaccaagaggagttgggcttgtgtgctgatctttcctggagagcctgatgagaccatgtgccttgtgtccagttcaaggatgggataggttgccctgatcatcggtaatctgcctagaggatttgctagcttaccgcctgtattagtccgtttgcatgctgctaataaagacatacgggagattgggtaatttataaaggaaaaaaagggtttacatggactcagtttcatgtggatgggaggcctcaccatcatggcagaaggctcttacatggcggcagacaggagagaatgagaaccaagtgagagggtgttccccttataaagccatcagatctcttgaggcttattcattataagaataagaataagaataccataagaatagtaccgtaagaatagtatgggggaaaacttcccctgtaattcagttatctcccaccgggtcccttctacaacatgtgaaaatttgtcgagactgaggggaagggactgttgacctctagagggtggaggccagggatgctgccagtcatcctgcaatgctcggggcagctcctacagcaaagaagtatggccccagctgctaattgtgccaggaatgagaaagcccaggctagaacctttcttccctaaatttcatcagaagtaacagtgattatatatagaagccttaagtgctgttttcttgtgaaaacataaatttaagaggataaagtctggacttctgaggataaaacatgaactagattatccattctgcaattgtgcacctggctgtatcccagaggagccttgctatgcccccctccctttctctcgtggtttgttaatgttggggaaaactgatgaggtctaattgggcttggttaagtgaattcccaaggggaagcctccttgctcctttgctctctcaatggctgctttgtgtacagctcccctctgactctccactggagccacgttattgtattctcacctgttcaacaggttttccctgaacggtctgagaaataaataccagttaaaggggtagaaaaacaagcttggcctttgattcctagaaggttagatgaccttttttgctgtaattctagacaattttatgtagaggtgggggcaaggtacttaaaatgcattttaatttttattatttactgtcttaacccccacgattgtgtatgctttcttttgaatagtgttacctaaaattcacacaatctgtttgcacattagagcctgctttcttaattcttattctaggatatgtaattgaacttggatgtcgaactgaagtaatgtagcacagataaaacgcattgttcttagagctctcaagtattcaaagagcatacagactatggagaggaagtccgaagtacagattgtttgcttgcgtttgcacaaagaagacactataattacttaacaagtccctattgttggatattcaattgttttcaagttttgagaattataaacaaattggcattgctatggttaataattatttcttgaggataacatcctagaaaattaaaattactcaaagaggatgcgaaattttaaggcttttcgtatagtttgccaaaggccctctggaaagctgtgctgatttacactctgaataggtgtgcagggacacacagcttccttctttagaagtcacaaaccaagaggtgtggtggaagtgtccagggggtcaggagttctctgaacacattcacttactgttcttgcacttacttggcttcagcaagtcacctgtttcaggaacataacaggcatgctcctgccttggggccttcgcacttgctgattttttggcctagaacctgatttctccagacgtccacagggcccccatcctcacctctcagatgtctttttttttttttttttttagatggagtcttgctctgttgcccaggctggagtgcagtggcatgatctcggctcactgcaagctctgcctcctgggttcacgccattttcctgtctcagcctcccgagtagctgggactacaggcacccaccaccacgcccggctaattttttgtatttttagtagagatggggtttcacggcgttagccaggatggtctcgatctcctgaccttgtgatctgcctgcctcggcctcccaaagtgctgggattacaggtgtgagccaccacacccggcttgagacagagtctcgctctgttgcccacgctggtgtgcagtggtgcgatcttggtcccctgcaacctccacctcccgggttcaaatgattctcttgtcacagcctcccgagtagctgcgattacaagcaccaccacgccaggctaatttttgtattttttagtagagatgaggtttcaccatgttggccaggctggtcttgaactcctggcctcaagtgatccacccacctcagtctcaaagtgttgggattacaggcgtgagccaccgcacctggcctcagatgtctttactcaggtgctgccttctcggtgaacctttctctgagtttcctgtttaaaattgtattcctgcccctcccacactggtagaggcacaggcttcagtttccttcgctgcttgatttttcttcatatcctttgttgctatatcccagatttgctgctgtatatcctcagcatggggaatagacctggcactgagcagaggctcaataattatttgttgaatgagtgactaaaccactgctttgtagatttgctcttgctagttaccactgattagcttctcagcaggcttccctaatcatctttggccaaaggagtagcggttttgttttggttcatttcctttacttgtcagctgcgctgaagttagttatttatataactgctggtgttgttgaggcttccattattaactctgctatctctattgtctcagtaatgtccagctactgctgagatctgggatagtaactcacaaggcctactctggtctggtaaaggaccaaatgcacatgtttaagatcttcgttacagatatcaatttctcaaaaaagacaagagaacccaatagaaaagggacaaatgtttggactgttcacaaaaagggagcgtgtgtcttttcctctttatgttcagcctcactcacaataagagaaatataattttaaaatacattaagattttatttttcaacctgtcaggtttgcaaaaattcattctgttggtgaggctgggtgtaaatagacaacctcatacaagtccaatggagagaaatttggaaatggctatcaatattaactgcacctatgttttgacccagcagtttcagttctgtgaatctattgtaaggatgtacttgcatatgtgcaaaatcagttatatataagtttatggatcacagtttggtttatgatagctaaacttaagaaatcacccaaatggcccacagcaggggactggttcatcaaataggacacatccacacaatgaactactatgtagctgtgaaaagaatcaagatgctctctttgtactaacatagaaggatttagaaaatatactaaaagaaacaaaaagaatgctcccttttggccagtcacggtggctcacgcctgcaatcccagcacttcaggaggccggggagggcagatcacctgaggtcaggagttcaagaccagcctggccaacatggcgaaaccctgtctctactaaaaatacaaaagttagccggatgtggtggtgtgcgtctgtaatcccagctactcgggaagctgagacgggagaatcgcttgaacccgggaggtggaggttgccttgagctgagatcatgcccctgcactccagcctgggcaacagagggagactctgtctcaaaaaaaaaaaaaaaatgctgccttttatataaagaaagtggcaaatgtaataatgtatttttgtatttgccttctatacttgaagaaagtttggagggatacctaatgactttggataactggaagtataagaagtgaacgcagatattgggcaggtgggtgacactgggagaagagactctacactgtccgtctttgtacacacaaacacacatacacacacaagtttgtatcacatgattgttaacaaaaaattaattttaaaaagaaatggggctgggccaggtggctcacgcctgtaatcgcagcactttgggaggctgaggtgggcagattacccagagttcaagaccagcctggccaacatggcgaaaccttgtctctactaaacatataaaaattagccaggcgtggtggtgggcccctgttatcctggctacttgggaggctgaggcaggagaattgcttggactcaagaggtggaggttgcagtgagccaaaattgcgccactgggcaacagaaccaggctctgcctcaaaaaaaaaaaaaaaaaaaaaaaagaaatgggctagcctgggaagaggcagcagaggataatggttacctcctttgtgtaagaagcacgattcattcaagtgagaattcaaagtctgttctgaatgccattcagtccacatctgtacattttctgccccacccccaccccccaccgaaggtgcattgtgtgaaccgaccttggggagggagtatgggtgtgcatgtgtgtgagctctcagggtgtttctccttcttcatgatatcctggttgctatagtgtggagatctgtttgtgacacacagaaaacactttaaagaaacactgcttcctgaccatgacttcctgggcaatctgtccttcctcagactgttgagtgccagacgtttatatgcatgtctggacagagagtgagcctggctcattcagaccctgggcaccattcagagcagaactcagtggtaaggaacagctttctttccactgaagattcgcgcaagccgtgccccacagggcagcgtctcctggcggctttgactcaagggcgttggcacgggcacccccatctttcttctttcctcaggagcccattgtaccgttggctgtgcccctgcaccttcagcacccaggcaccaaggggagccgtttttcataccaaaccaccagtgaaaacaggaagtgatgaagcaaaattcaccctgcatctgcactgagtgacttctctttctttttctgtcattcctcattaggtatagacacgtgtggccgtttacgctgtaggatcctcattcccactggctttgaacattttggggacttacaatgccgccacccgcggacatcgtcaaggtggccatagaatggccgggcgcctaccccaaactcatggaaattgatcaggttagtaacgtgacagcattgggtgtctattttcagtttcctttctatactggaattttcatagactttggatagctcactcttctccctttctctctctagctgtgttgaaaaatctgtgcaataatagttgcaatgtgcttgatttctgtagcacatacagtgatggatggggtttttatactcttccagcatccacttggattgtgtcaatacaggatttgtgtctgaagctaggaaggaggtgggagggacaagtggatcgggccctgggcagttgacacagtggaggctgccccatccctgccttgccatgacacatggatatgtgcagattgttggaacacaggcaagacaaaacttaatttttaaaatcccttttttttcattttttgcagaagcagccaaatgcattggtactttgttatattaatagctttgtaatgaaattagtatagaggggttcagtcttggatttcagccaattgtaatttttatttttagtgtaaaattcacaatgtgtctagcatattgtctgccatgtagtaaatactcaacaaatgtttattgaattaaaaaatatcaagaagacttataaaagtggcttgacccataaaggcatcctttaacttgaatcttgagaattgtatggtgtgattctcatgcactatttgattataggttatctcagaatggttacttttgtcctcactttactgtagtcactctagagcaaatgatttaaggaataaaaggttgagacctattatatacttacaggtttcataatgtatatagtatagggttctagatggctttctacattttcaaaattacaataaccatggcaactccaatctttatgttctccatactattttacaattatgatttacaattttttttcctggtcagattttattatctggtggcagatcaatgcgagagttatatggaattgtgcgaatccaaaggaatcattaaaatgaattatactggtcagctcagaattaattgaacttaaactcaaatgtaagaaagggtaaatttttgggatttttgtcaaaaaagctgttatcagaccacacatcattgtcattttaactgctctctgaggtagttttctactgactcaagaaggaacctatacaaacagagaaaagtagagatgcctaatagtttcggatatatttgagtcaggcaacagatgcttatctgctttcatatgtggtttgagatgctagttaaaatttaccttaagaaaatgtttggagatactcggtgcagactaaatgtagtttggattaggtttggccacagcctaagagaccagtggcttcagtgagatggaagttggtctcacacacgtgtagagaggtcctgaatgccccgcagtggcatgcactggggccctctgtcttgttgcattgcccttctcaatctgtggagctttggaccacatgcttgggcatcaccgaaagcacattagaaatgcagaatctctggtcttattccagacctcctgacccaagtctgcattttaacaagatctccagggtgtccctgtgtgtagttcaatctgagacgtgctgagctggatacctggtgcccaagcccgagtactaatcagaattacccaggcacttattcgaaataactattttcagtggtcccatcccaagagactctaatttagtggttctggtaaactatttaattttgattctgccatggtcagtgcagtttgggaacctctgctttaagacagcagctcttgatagacagtcctcctccttacctgtgaggttagtgtagtgttctctgcctttggagatggcctttgctatgtgtgtgttttaatatatatatttttaaattatctgtttattttggaataattttagatttacagaaaattacaaagattgtatatgcttacatttataccctatttccagtttccccttatgttaatatcttaatcttggtacattagtcaaaactaagaaattgacattggtacatcacattaacataactaccaactttatttggatttcaccggattttccactaatgtccttattctgttcgaggatccaatccagggatacgaattgtcacgtttcctcagtctccttccgttttggacaatttctcagtctttccttgtttttcatggcctgatagctttgacaagtaattttatgttgatacaattttaaacacacaaaaattgccaggatagtacaaagaactctgtacctactttttctgaaccatttgatggagccctggaagcaccatcccccttcacccctgaacactcagtgtgtatgtccctaagattgtagccattctcttacataataatcacagtacatttataaaaccagaaataaattgaatactggtataatgctatcgtcaaattcacagttcgtaatccatattcaaattccatcagttgtcccaataagatcctctatagctattttctctctggtgtaatatcctgtccaggatcatgtactatgtttattgtcaggtctctttgatctccattgatctttagaaatttctcagtctttatcttttgtgaccttgacatttttgtagagtacaggacagctattttaggaaaagtcttcagtttggggttctctcacatatcctgctgatcagattcgagttttgtatttttggcagaaatgtagagaaatgatgtgtcctttttggctcatcatatcaagaggtacatggtgttgcattgcctaattcttgataattattctggttttacagatgacaagtgtaaacagttggttaaattataggcctcctattaatcacatatggaaacctagacgggcaattaggaacccagttcctaattgccctgcagttgctggaattacaatgagacttatggaagtgttgctgtcagatgttgtttcttgattgaatcagaagttggcacaagaattagaagtatgttttcacatgcaatgaagagtagaagaaatgattattacttgggttttctcctaatcttctaccttgttcagtaaagatcacataacctgcctctctcccatagcatgttagcttcatttagaaagctctttgcttctttttagcctggatagctgctatttcactaaaagccgtttccaaaagttgggttaagcactgctgctctattgtctcccaaaattttgggtgcccctccacttatcacattgtattgtccttgtctatcaactgaacccagtggtcctcaaccttgactgtgtacaagaagcatccagggagcttgtacaaaatgcatataccagcttgtgcaaaatgcagccccagctgcagagattgtgattctgctggccaggggcagggcttttcatctgcatctgtgataagcaccagatgaatctaatccaagggcttccacagtttgagaagcagtcattagactgggaactgcctgtctttgagtgttgtttctccttgcctggtgaacagtccttaaaatgaaaagatatttcatgaatgaataactgggaggcggtgcttcctgagtagtgattatcttatcaggtgctcaattctgctcagccaccctccatcagtgcctggagttttcagagggacgtctgcccatgatggacttgtttatcttctttctaaatatttaggagaaaattctgtgtttccactcagcaggaaaaatccccaggagcttcttacacatggactttgctgtatcacaggaaggtctcaaaagaattatcaactcactggttcctgactcctgctctcgccttcacaatgtattgttgagtttcaagcccggggagccgcttgaggatgaggatgcttgttgtctggatatatcaaggctcctgcatgcactgttcttgttaacctattatgtcctgaataatgtatttgtttctcggtcaagagtctggaatcccaaacacttcaataagcagcatctagtaagaggcagtgggctccaaggacatttaaacctggatgtgagcacttgttttagttccttcagctgctataacaaagtaccttaaactgggaaatttatgaacaacagaaatttattgttcacagttctggaggctgggaagtccaagatcaaggcaccagtggatgtggtgtgtgatgagggcttgttcctcataaatggtgccttgtatgtttccccacaggcaaaaggggcaaacaggctctgtcaagcatgtttttataccaccaccatgggggccaggtttcaaacagatgaattttggggagacacaaacattcagaccatagcagtcctggagccctgctttctgtgaaaggctcagttagccttgagcctcagtttctttgggataataatttgctactttgatggtccttgtgaagattaaagaaatcatgtgaaaagagtgtagcatgttgcatagcttagagtgattcctcaataaaagcagccattattagctagattagaaaattaggtactctggttttccttttcacctgcacttccattgtgaacatttgccctctgttctcattctttctctgcctaactttttcaatgtttaggaaggagaaaaaattaaaagacaagtgggaggcatcctctggtaataaagaggtgtcctaattggacacatagccaatttgtgctatggaatattcactggctccctagtactctgtgattttttttttccatcttggccactcaccatttctgagcagcagcttttctgttccctgcataaactcttcaagcctccagtatttcctgtctctgccctgccccctcaggccttgcttttcaaggaagacacagaccagaaagctaccacttctgtctttgcctagaacttctcggcctacatatttgcatggcatcacagactacctgatgcctttatctcctgccttcctgttttgttttgctttttctactgctagcagagaagggaagaggtggtcccaatttgtttccagtgctttcagcttatcccaacccccaatgctccacataggtgttttttttttttttttttatactttaagttttagggtacatgtgcacaacgtgcgggttagttacatatgtatacatgtgccttgttagtgtgctgcacccattaactcgtcatttaacattaggtatatctcctaatgctatccctccccccttcccttaccccacaagaggccccggtgtgtgatgttccccttcctgtgtccatgtgttctcattgttcaattcccacctatgagtgagaacatgcagtgtttggttttctgtccctgcgatagtttgctgagaatggatccaaaggacatgaactcatcattttttatggctgcatagtattccatggtgtatatgtgccacattttcttaatccagtctatcattgttggacatttggcttggttccaagtctttgctattgtgaatagtgccgcaataaacatacgtgtgcatgtgtctttaaagcagcatgatttataatcctctgggtatatacccagtaatgagattgcggggtcaaatgatattagcccatcctttctaccctacctggggctttgtcccagccatgttctcttctcttattcttttcttcttctctgtcttcaacagtgaactcttctgttttcaccttggaaaatcctccccttgacctagtaactctcttttggtagtattttattctgtttttccattccaggcttatttaaatgttaccagtatatgccatctatgttgttccatgcttattttaatatttgcatgaacaacaatttacctctctacagggctcccctttttggtggcacctctgccttggttgtcctcaccctctcggttacgctcggcaaagctgcccattctcatcttcttgaaactctcccttccttcctctagcttcagtgcctgagattcttcctccctgtttgattcatctgggattgtttccttcctggttcctcttctttctagatcagttccaacctcagtgctaagccctctggtctgtgtgttcactgtcgacactctttgtcttagagtccatgttcgctcatgacgttaaagtttcacctctgcctacatacataacaacagttcccatcaccggcatagcctgccagctaaccactagtttcatttctctgttgggtggatatatggttcccctctctaacttcagttgtctacagacgagacaaatggttagtgaaactgcccatatgttaacctgaagaaaggagtctcacaggtattaccaactttttgaggttatatcatgtagaggggggaccattagatatgttctttttttttttccttgacgcagggtctcactgtgtcacccaggctggagtacaaaggctcaatcaaagctcactgcaacctctaattctgggctcaagatatcctcctgcctcagcctctcgagtagctgagattacaggtgtgcaccaccatgaccagctagtctttgtatttttagtagtgatggggttttgccatgttgcccaggctggtctcaaactcctggacttaagcgatcctcccacctcagcctcccaaagtgctgggattacagtccatgaaccaccacagtgccctgcctagatgcgttctttatggcccaagtgtaggaactccatcctatttgtgctaggagacacatttcaccttcacccaagaaaagccagcacgggccatctcatcaggcgaggggatccatcatctctaccaagtgtgcatcagacaaatgcttggagaagatgttctgagcatattcaggcccaaaaagggcaatgggaagagatacatagttttcaaccttagttctgcttctcaaatggcttggggcagaggggtggctgccgagggcttccgggcacccctcgctcactcctgctgcagcacctttgtattgtcccattttcatttgcgtatgatttggggaaagattttgtttgaaaaaagtttatcagtttaaaaaaatagacatggatgattcttgagctttctggtattcctgagacttcagtcagattctttagggtggctttgcatccttccatatttttcataagcattgtccctgggccaaggtagtgtctgcaggcactgtatgtgattcccaggtacccctctgttttatagaagctgctcctttagacgcttgttcccgcacattcatggtcttttttcatctcttgccgtttccttctaaaagtatgccaccttgaatgccccctgccttctcccagctctctactgctttaaatcctggctttgctaagcactgcagagagcctcctttgtactcaaaccttttctgatcgcattataatgcagtcttttctccagttttctaatttcttatatcattttctttgcctgtagcttttatttgcagttaatatatttcacacgtaacgtaatttacatttttcttttttcatgctcacttctcttgaaatagattataagctcttggaggtcagccagtggcttacatacatttgtatcctttggttcatcacattgatctccgttactgtgtgtgtacaataggtttcaattctgaacagtgaagataagaataaaacactggtggtcttcattctccaaacagaaaaattataatagcacgcctaccccagtatattgggaaggggttaattccctaaaagaaacacagatgcatgtgttttaggtaagtgtgattgcctgcagtttttcaactaccatatttctatagcatatttaagatataattccatatgcataaatttgatttacacaagacctttgaaaagctcattgagtaaaacccatttgagtttttgtacttgacatggaattttgctcgttagtagcagtaataataacagcaagcaccacacactatgtggcaggcaatagaaggccttgcacgtgggatttcatcaccttactacagccttcaagatcggcttaggctccctacttcatagttattcaaaggttcattaacttgcccaagattactcagctaggaaggtactgatttgaatccagcactgtataacaccaaaacccaggcagttttttggtttttttcttgttgttgagatggagttttgctcttgttgccccggctggagtgcgatggtgcaatcctggctcactgcaacctccgtctcccaggttcaagcgattctcctgcctcagcttcccgagtagctgggattacaggtgcccgccaccatgcctggctaatttttgtatttttagtagagacagggtttcatcatgttggccaggcttagacattgccaaatgtctcttgggcggtggacagagtctcctcctgttgagaatggactaggtcaggggctcctgagcttgcttctgtatcagaatcactcatgaaacatgttgaaaatacacagaggatcattgtgtagtgattcaaggttcagggatccttgtttttatgaagctcccctggtgatgctcatgctgttggacctacatttgaaaacattgttgtgaagcccttgaaatttatcactctccctgcaggagctacctttggctcccacggtaacttttagtgagtcctttaaagatagtgcctcaatttatccatgagggaaatggtcctaaaaattcttagcctctcctttacagagagtacaaacatagttttaagagctcattttgctccaattaagaaagctgtaataaagactgtgatactgcaccattgctttcataccgtcataataggtgaaatgacattggtagaggaatagacatccttcatctgatttttgcaacttttagatttggtaatgtaacagatatttcttaaacttcctttaaaatgaagtgactggggtacttacttttctggttttagctctcttttcttgtgtgagagagtctatataacctcataaaatcttaaaaatttgccaagtttttgaagaaaaacacagcaaacatatctctccctttaactgagctgagtttaattgagcgagaatgaactctggcattctccttttccttcagcaaatgaaatgcagatttttagtttgctctgtaggtgggtgctggtgggattctcttctgttctacttccttccacaacactgccactctgagaagttcgggcaactcaggacactcttgtattaactatgttttcttaagacttgatgactaagacctctgacatttctagaaccttttgtgaatgttacactttgtgcttattttcctgttaggtcaacaggttaattgtggcaggatatctaaatatgtggatttcagtgttgagaaggaactctgggtacccaggaacaaacagcttgtactttaggagtatatagaccaatgtgcagtgtgtccagaactccaaggaaatgagagcagcctctagcaaataaaatatgtgcttttctagtttcttgttcctagctttccatcaaatgcattcatgggtcaatggcatcaccatcatgcttaacccccatccccacaatctccatagcccctcaaatagcaagtcctgtaaaatcagcctcctaagtgggcttgagtccatccaccctttttccgtcctagccgccactgctgtagcttatttcccctaggtggcttcagtagcataacagctggctgccaggccacgcttcttccttcccctccaatccattcccctaggcctaacattctgcactggcttccattgcactagaatagaatccagacgtccttgctgtgttggcagggccccctgcccccagctcttgccagtgcactgccttgcttagtgccactctggagttccccaacgccaccatctgagttctcatcatatgcaaacattttctcctttcacaaacacaaatttcttcctacttccaagtctttaaaaatgtgattttctcttaactagaaattatcctcctcagttctctgcatgtctaacacctgtttattcttccatcccagatgaagtgtaagttccttagacctttctctaaggccttttctgactcttcagaccggatgagggtgcttgctgtgtagaacttgtaacatcccacagggctccacttgtcagcattgtaatcactacgtgatgctctgcatgggccaagtatgtccccagcgccagcatagggcctgcacgtggtaaactcataaggagtgttgagtaaaggaaataagtgatatttatactttttctgtctattgatacagacaataatacatgaacaggaatgactatggtgaaggcattctttgccttgtttgcaccatgtattctaaatacattattacattttataaattggctttaggaaaatctttgtgtgtctttccatcaaagccatctgtagttaaaagacaatcagtgactttgagacaaaccagctcaaaatgatgatggatgaatccttactctgggacaaactcgtggcgatctgtttggattgatcagcctcatcatcatgagatgctcataatttccggctgtcatttcttcgttgaccaccctgacctgtataaacaaccatccatctgcctgtctgccttgcttatctacatggctcttgtacctcaaactcagcatattcaaaacggtccttgttgttcctcccacctcaaacccatacagttttgcttttcttcacgttttccttttcttggtgacagatgtgaactacacccagtttgctcaagctgacaccatgttgtgtcttttagactctttttttctccctcatctttttatccaatcagtcatcacagaaaactgtctgcatctggtctcggtcacatctgctgctgccaccctctctggacctcttccttctggtcagtgtggaggagtacacagagcaggagagagcttaaacatcggtgtgtgttgagtatcctcaaagcacttcaaaagagagagcataatatctacacaaacaggagattatgaggacaaagcaaatgggtataaattgtgaacaggtgtatgtgagaaagagccaattagacatcttataagtgaaaaatgcagtagtcactgggcgtggtggctcacacctgtaatttcagccctttgggaggctgaggcgggcggatcatgaggtcaggagatcgagaccatcctggctaacacagtgaaaccctgtctctactaaaaatacaaaaaaaaaaaaaaaaaaaaaaaaaaaaagccaggcgtggcggctggcgcctgtagtcccagctactcgggaggctgaggcaggagaatggtgtgaacccgggaggcagagcttgcagtgagccgagattgcaccactgcactccaacttgggcgacagagcgagactgtgtctcaaaaaaaaaaaaagaaaaatgcagtagtttttcccttatctgtgggtttgctttccccaaccaactacagtctgaaaatgttaaatggaaaattccagaagtaaacaactcataagttttaaattgtgcactgttcagtgtactgtgataaaatcttgcattatcctgctttgtccctccaggacttgcagcacccctttgtccagcatatgcacgctatagacacttcccatttgttagtcacttagtagccatttcagttatcagatcaactatcatggtatggcagcacttgtgtccatatggcccttattttacttaataatggcttcaaaatgtaagactagtgatgctggcatttcagatatacccaagagaagcttcctttaagtgaaaaggtgaagggtctagatttactagggaaggaaaaaaaatagttgctaagatctatggtaagaatgaatcttctttctgtgaaattgtgaggaagaaaaataattcatgctcgttttgctctcaaacctcaaagtgcaaaagttagggccacagtgtatgagaaatgcttagttaagaccaaagaggcataaaatttgggggtggaagatatgaagagaaacatattctgattgacggcagtcaggttcagtactatctgaggtttcagacatccactggaggtcttggaacatatgcccctcaaataaaggagggactactgtatatgttaataaaatgaaaaaaaagaaacaaaacaaaaaccaacagcagaaagataaaacaataaaacacagagtaactctagagtggatttggctaaagagagaattggttaattgaaggttgaaaacaaggaattcattcagaacatggctcaaaagagaagggaatgaaaaatattaatacaaatgctaagctgtgttgaaaaggataaattaagaagctataatctatgtctaattggcagttccactaataaggaaatgaatgttggagacaaaatatgtaaagagcttctggctaatgtcatgcttctctggaattaaagggaaatctgacagtgagaaagaacaggggctctggatttggccacttggatctgtgaggctctcccatcagaagccatgtggactttaataccgtgtccaagggagtagaaaatggaagatttctaagcaggggagtgacgtggttagttgtacttttagaaggtgccaattggagaattgttttttgagggcaaaatggaaaatgagaggctagattgctcttgcagtagcccaatcaagaaacaactatgccatgaactgggacagtgatagggagacacaaagaagttaggtatgtgtccccgttgtgacatatgggaagactaatttgacagaaaattgatgattgattatgtgtgtggggtaaggcagagtaaagtgctaagggtagttctgagatttctggtatgaacaactggaaggatcttggtgacacctgccaagatagaaaacatctgtagaggactgtttaggtggacttgcattcctcatggacaccttacagaggggtacaggcaattgttcaggtgtcagcatatctcctttcatatttccttcgggttttgatacactggccagttttcccatttaacttctctcaaccccagtgcaatcccctgtcatttgagattgcacacctgattatgctgctcccctgtctaaaaacccacatgggtccaaacctttaagagttgtcatagttcagactcactaaaagagagaattgtaaatattctcaccacaaagaaatgataaatatttgagatgatgggtatgctaattactctgatttgatcattccacaatgtacacatgtatcaaaatatcactttataccccataaatatgcagttattgtttgtcaattataactaaaataaaactaaaagagttgtctataggaattaggcattttttcctctatcttgccttttgagccactgtctcatctttcatttgtgtgacattatcagctcctccatatgcaaagagggtcatccattttgctctgcctttgcatttgctgtatcttcaacccaaaatgccttcggaaatccagatagcactgacttgtgcttgctcccctgtacccacaggcagaataaagaggacagctttgagagtcactccggactgcattggcaggacaggaaacaaacaacaatatgaaggagagagggaagatgtagtgttgattccaagtttatattctgacaaactagaagaagatgaataaaagttgaaaactgggaaagagagttttggggtaagatttgagtttgaggttatgaaaggatatgcattcaggttgaaatggtctgagacagaaaggactacagagaagttggggttggagatggtgatttgggcatccagagtgagcttgagcagagaggctctcctggttggtatcaaacgttccagtgttaatttaggattttataatttatgcatgaggaaggatcatctactattcatatggtgatgctaaaacattgcacttcaaataagatttctcctgaacttcctatgtgccaggaaccaaggcacccagctccagaacccactccacaggtgttagcgctgagcacctgggcttgtcgttcatggttttgaggacttggtagatttgagatggagttaaagggtaaggattgtggaattgtacaggtctgtgttcaaattctgactctcttccatgtgctgtgaggctatgagcaagttacacagcatcttttttttttttttttttttttttttttgtggcagggtctccctatgttgcccagagctggagtgcagtggcattatcctggctcactacagccttgaccttctgggttcaagtgatcctctcacttcagcctcccaagtagctgggaccacaggcatgcaccactatactcggctaactttttgtattttttgtagtgatgaggttttgccatgtggccaggctggtctcgaactcttgagctcaagtgatctgcgcacctaggcctcccaaagtgttgggattacaggcatgagccactgtgcctggccaaattacgtaacgttttaagaatccctcatatggtttgctcattagtgaaatacacttagtaatatcatctggtagggagtatatggtagtcactcaaaaaacagtagctgttgctacactgtatcataattagaaaggctggccaagtgatgacagtaaaagaagacagtaaagtctgggttgatgatatattgaaggtaggggtgaagaatgtgagattgtcattattgtttgcatagtttagacccttcctgaaaatcctgtgttactattcttcagggctgtaggttctgcctcaggttgccaccattaacttagtgggacattttttgagactcagaagccacgtccctccactacctgctggcagatgtctcatcatgtccattgccactcaagaaaggaggatgaattgccattagtacatccactcaaaagcacgcagaccaactagtagcaaagagagacaagaagtacaagaaaaaaataaaaaaactaaatgagaaacatgaactaatttcatacttttttggtcacttgttcctttcagtgttcttttgactgctgtcttactttcaatctcaggttccttgccattgataaaccttcatagtcctgtgtggaaattgagcctgaaccctactttgccttcagggcttattggctttctcatatctactctcctagcctgataacatcctatccattggagctgacagtcatttctgtttatcctattgaatctgtctgaatttttatttttaagctatgcacataaatacagttaattttacaaaggtgaacttgacacacataaatgaattatttcacatgggtgaaggtaagcagaccataaggcctgaattgattctccctgtgaatcattcatttccacatgaaaggaaacacttgattacaaaggcatggtggagtgcagtggccttctgtgcgtctagagtcatctggaagtacttggaaaagactgatattaaggaagtttgaagacaatatgggaattaggaaagtggttgttgttgctgtcagatataaggaaattggggaaaaacgttgttcttgatatccatagcaacattgatatgtaacaatattcactaaaataatcaggaactaggagaatcacaaaagattataattgatctaagtagtcctttatttttgcattgttcatctctatagttctgtcattatctaaagttgcagtttcccttccaattgaagggaaatacaatgtctgctgagcagaagcatgttagaatatctaaaggagaaggtaggtctgcttgtctttaacccgttaatacattcaacataattatttctatctttgcttatcttcatagtttagtgatttttatgacagaaagactgtactttatcctggtaaaatctaatacctaatttgtttcatgaagcttgaaacaagacacttttggtaaaccatttaactgtttttttgaaatgaatcatcatttgtcaagaaaaaggtggcagagtatcatctttcatttttttttttttttttttgagatggagtcttgctctgttgcccaggctggaatgcagtggtgcgatctcggctcactgcagcctctgcctcccaggttccagtgattctcctgcctcagccctctgggtagctgggattacaggcgcaccccaccacgcccggctaatttttgtatttttagtaaagacggagtttcaccgtgtgggccaggctggtctcgaactcctgacctcaggtgatctgcctgccttggccttccaaagtgctgggattacaggtgtgagccaccgtgcctggcccatctttcagtttttaaaattaatgtgatccatggttttactactgtggagaggttgctgtaagccccctttgtcatttttgataattgcttgaatcttgggtctgttattcacacagcaactgttgtcagaatacttgctttccaagaaccagctgaatttgcctcaggaaagtggggctttgtcgttacctttcagattcatcaggctgttattaggaagatagggtatggacacagccttttcagaacacatctgattcctccatacaaaagtagatggctcagaagcatggagagtggtggtaggatcattggaagaagagtagaactgttataaagtgattggtgtcattgacacaatgtcacgaggcgcctctgggagctagatggcttattgtacattaaagttccttcaagtcacattgtacacgttgtagtcaacatgctatcctctctcagtggtgtcctgacatttgaaagctagatttcttttcttcctgggccaacgttactaataactgcagagcagaatatgttcaatgaatttctatctataaaagcaaagtaaaattccaaagtaaaatcccaagtgctgtgctgtaccacctcaaagtgttagaataaagcatctgtcaggtaggtttttttttaagcactggagaaatgctttttaatagtctaggaccaaaaactttaagtctttgtggaaaagcattttgcagttagagggccatgaggctatcgctggacagaagggtggaggagcagtgaggaccggggaccgcttctgtcctctgcttgctgtgatccgtctttagctgctcccctgagcctccatggcagtcaggaagagaccagaaaaaaaagagaatctaaaagtctggaaacagaagataggtttttaatcaatgttcattaactgcatgcctttccaggcccagcagccacgcgcctgggaggggacagtgtcccacaggcagtctctgccaccaaagtaagtgccatacaggtggcaaaacacaagaagatgaatttaagaataaacagcaggatgcggcaagtgccaaaggcagcatcgggggctggagtcactttaaggaagaaggaggaattggattttcattcatttattcactcaatttctttaaccagcatttttttttaaagtgtgtgaagtgtccaagggatgtaagttaataaaagaagctctctgtagataacgttatgtaatgccctactatgtaccaggtgctgtttcaaggattttacaccattatctcaattaatcttcataacgggaagagaaaacagaagcactgagagaagtaacaagcccaggttccaaagccagggactgcagaagccgtccctggaagtcctctaaagtcattgatggccaggtgcggtgcttacgcctgtaatcccagcactttggaaggccaatgtgggagaattgcttgaggctaggagttcaagaacagcctgggtactatagcaagaccctgtccctacaaaaagtaaaccagccaggtgtggtggtacacacctctagtctcagctactcaggaggctaagacaggagaatcccttaaacccaggaggttgaggctgcagtgagtcaagatcataacactgcactccagcctttgtgacggagtgagaccctgtctcaaataaataaataataaagtcatccaagagctcatagttggggggaagatagagaaaaacacgtagtcaataaaaattcatcattctaaaaccttttctcgtgtctgttcacttgataccacctcatgaacattttccccatgtcattagaaacatttgaaatgaataaacttgatggaagcagccttttttttttctgggtgatgcccattttgaggcaggcagaggccggagaagtggatgtcagagctgagaacggcagcccatgctccatagtggctaaaacaggtgtgtgggcacattggctgggggcgctgccagtctcagcaggccagtgtcaaggcagaaatgtgggcagcaacagacttgagctctccaaggtgagcatttgggcttagtaaagtccccaagccaggtgccttggccaacagacaggaacaggtggctgcgcagccagggcctgccagtgctcatcagaggcggggcagggaggggctctgatgagggctgacagctggggggtctcctgggaaggtgcttccaggaaggctggactggccatctcctaaataaacagccaaggactcccctggtggctgggtctccagtgccttaaaggaacatgtactctgagtgagagagtgatcatattttttttaagagatcaagaagaggcaaaagagaattgtttagtaagaaagaaagaagtgttaaatttaaaagggtggcagggcatccttgtgatccatggatccgcataatgggttatgcaggactaaacctagaagacggctcagaggggagacatggatttagaaattagtggtaccagcattgtattatgggcaaaggaaaaagaatatagaaaggaaagcaaaagaccaatactcactttaaggaatagagagagagatagattgaaaatcagctggtagagaatttggccattttcaataatctagcttttgtttttttcctctgcctcctggctccaagcaattctcctgcctcagcctccctagtagctgggattacaggcgcctgccacacccagctaatttttgtaatttagtagagacagagtttcaccatgttgctcagcctggtctcaaaactcttgacctcaagtgatccacctggcttggcctcctaaagtgctaggattacaggcatgagccatcgcgtccatccttaaatctaacttacgttacaaaaattggcaataaatcttcttgtgtaggaaatttactttgtggacttactgtctttagtaaagtaacaaaggaactcttttagagaaaaagagttaagataaaaagaggaatacatccttaataagaaaagctactccttgaatgtagctattgacacatggtactttgccagtcagattcatatggaaaggcatacttcatttaacaaataacgatatttttgcaaatgttaaaatttccccggaatatactataaagtgaagaaagactttgatatgctgcaagatgacctcattgttgggaaggggaatggggaaaagaatgtggggtcatggcctccgtgcttatgggccttgatccccgcacatagaaatgtggtaactgcctaatcctctaagttattctgaaaaaattcctgcttttgtttttcagctcactgttgagtctgagaaggcagttttgatcatccaaacaaaaagcttaagatatttagtgatgatttgtataaattatggaaacatactgaagcagttaaaataatttggcctcaataccaattttttttcgagacagagcctggctctgtcacccaggctggagtgtagtggtactatcttggcacggtggtactatctcggctcactgcgacctctgcttcctgggctcaagcagtcctcccacctcagcctcccaagtagctgttactataggcgcacgccaccgtgcctggctaatttttgtatttttgtatttttttttttttttggagagagagttttactgttgtcgcccaggctggagtgcagtagcgcggtctcagctcactgcaacctctgcctcccagattcaagcgatttttctgcctgcctcagcttcccaagtcaataggagtataggtccccaccaccatgcctggctaattttttgtatttttaatagagatggggtttcaccatgttggccaggctggtctcgaactcctgacctcaggtgatccatctgccttggcctcccaatgtgctgggattacaggcgtgagccaccacatccagcctttaatttttatattttttgtagagatgaggttttgccatgttgcctaggctggtctcaaacttctgagctcaaactatccacctgccttggcctcccaaagtgctgggataacaggcatgggccaccacgtccagcccaaatattttccaatagagtacagaagttaattcttagggccaggtgtggtggctcatgcctgtaatctcagcactttggaaggccaaggcgggcggatcatgaggtcaggagttcgagaccagtctggccaacatagtgaaaccccgtctctactaaaaatacaaaaattagccgactgtggtggtgcgtgcctgtagtcccagctactggggaggctgaggcaggagaatcacttgaactcgggaggtggggaggttgcagtgagctgagatcatgccactgtacaccaacctgggcgacaacgggagactccgtttacaaaaaaaaaaaaaaaaagggagttactttttagttccttttgggtttatggagttatagggagaagaatcaagcagtttcatcattttgaactaaattaatttttctcctggggcttttcttttttcttttctgtgttttttttttttttttttttttgagacggagtctcgctctgttgcccaggctagagtgcagtggcgcgatctcggctcactgcaagctccgcctcccgagttcacgccattctcctgcctcagcctcccgagtagctgggactacaggcgcccgccaccacgcccggctaattttttgtatttttagtagagacggggtttcaacgtgttagccaggatgctctcgatctcctgacctcatgatctgcctgccttggcctcccaaagtgctgggattacaagcgtgaaccaccgcgcccggcctcctagggcttttctttcaatgaaatgaaaagcaaattattcagcgggtctacagaaaggtattaatatattattcatatcactctactctcaggtcttggagaattggacagatagacgtaccttacgtaaccttttgggcaaatgttaactaaaaagtccataaggcagagctggcgtttggcttggaatttactggtcaggcaatgagctcatgtcagacagagggctttctataggaaatgagaacaaacaaggataccaggctagtgttttcaagataattggggtatcttggtcagtcttgtctgcttatgagagtagaaggctcacctctttggtcatgcttactgatggtgatacttgtttgattggtatctgatttatcatctgttgaattacattctttaccagctggtgttcagtgctcttccaagccatgaattgcctaattcctacatgaatcattctgcatagggagtagtgacagctttcagtgtctaacagcttatggccagcggctgctcacagtcacccagcagtggtaggaaatgggaaacgtgctggttaatccaggctatcattaaaaatagttggctttttttgttgttgttgttttttaaaggaaagttcgtgaatgtatagatttttttcatttagcagaggtgtattgagtctcctgttagatcctattcacacctacatactgtggtaactagtactgaggggtggggaaggctacagaaatgaattaagatgccttgttctcaagggacagagagataagatagatatgtagagtcctcagaagttattaatttaatgtgctaagtacacagagggagtaattacatctatttagggagataagggggcatctgattagaggaggtggctttgacatggatattaaatggtaagtaagagtcccttgttagagttggaacagaaagaaggagagggccatttcaacaaagcaaatggcatgagcgaaagtgtggagatgggatttttttttgtttgtttgtttttggtgactcaccataaagatccagaagcatggggaacgtgtacagaatagtagaattacagagaccagattgtggatggctttggctgacaagctaagtgactgacacttttttttttttttcttttgagacagagtcttgctctgtcgccaggctggactgcagtggcgcttgatctcagctcactgcaacctccacctcctggattcaagtaattctcctgcctcaggctcccgagtagctggaactacaggcatgggccaccacgcccagctaattgttttatttatttatttattttttttgtattttagtagagacagggtttcaccatttctggccagaatggtctcaatctcctgacctcatgatccgcccacctccgcctcccaaagtgctgggattacaggcgtgagccaccatgctcagctgggacttacacttttattggagcaaacgagtaatatgagcaaagtttgtggggaaagtctaattttgtgtatttatagttgacatggggattggagaaaaaaaaattggagatgtggagacttatctgcagggacctggtgatgggatctttagaacaaaggtggtaggaaaggtctggaaagataaaaagggagagaggttgtggaagaagtagtgatgagacttagtgtcttgtaaatgtgtatgtcacagaatgtattaaggaagaaagagaagacaaggacaagttcgctagaaatgtgcctcaaagatctgctgaaagtaggcaagttgagtgtaggaactgatggaaggtacgattttgggttgattcgctagggaagcagttgattggaaattcatggcaaatagttattaatgatgggctggtactcaggaaagggtgctgggtcagaggaagcagaattaagggtgatgagattggggtgtacgctcaaagatctatttgatggcaggagttggaatgaggagagtcaggagttcagaagaagagttaggcggtgagaagcaatgctgtggacatcacagaggaaacagctacataacctgttagcaccttatatctgaagagtgaagacataaaggttaacgagactcctgggcagtagtggtgccataatgagggcagagaagtcgtggcagaatcaggtgtgggatctgagggatgtgtgctaccgttgggtagattgaggggtagggaatgtgaaagtgatgatttttgtttccacttttaataagatacctgcaggagagttaaaatgttctgtctaacagactgttagagatttgcaagagagtggggctacagctgtagacttaggacagttgaagagaatgagatccatgaggaactgactgattaaataaaagcagaaaagaggagaaaagaaatctggaattagagagctacaggtaaaagagcaactatgaaggatttgttggacttcattgaaggattagttatatgtgtaggagaatgaagaaaatattgcgctatatcatagaagctctggaaagggggtttcaaaaagaaggaagtagtaacagtgtcaaataaggcagacaggaaaaggaaagtaagaccggtgaaaaggttattggaattagtttttgggtggtgagggctaatgtttgattggggtagatggaagaatggaggggcccaccattatgtaacactcattttgattggctaggctaacctgtgggtgttcactcaactataattctttttcctctgtggtttagtttttctttcatctttgtctgttaagtctctaagctttgtgcatctgtggtctttattcctttcatatatcccacttcattatgttctaggtataatagtaccctagagacctctgtcttttaaaacttgattctctatctatgaatcagacctgaattaaaatccaagtaattcctctgagacttcagtctctaagtctaaatctgggagcagttgcttttgatgccttctcctacctcaacaataccttcttggcctgactttttgtttcaatgtaatttaagactaaaacctggctccgttatttatgtttcatttttgagggtgcatgaagtgaaatttggggagattctctgataagtaatcacagatcgatggcctacagggatctctggcagctggaagggcaaaattcttgtcttatggaaataagttttgtttctgaagttcctttgtcatttggttgagcgaacacatttgttcctcagctcacagcaagagccataaacagtggacagcttcttgcaaaggcctaggacttatgtaacatgtaactacagtagaacccaattgccattgtcatcttattctagaggacagattcaggatataaggaatacccccaccatctttctgctcctcagtaattctaggtttccttttctctccaactgcattcatttatttttttaacttttgtgcgtacttagtaggtatatgtatttgtgggttacatgaaatgttttgacacaggcatggaatatataataattttattgtggaaaatgatgtatctatcccgtcaagcatttatcctttgtgttacaaacaatccagttataccgttttagttattttaaaatgtgcaattaaattattgactatagtcaccctgttgtgctaccaaatactaggtcttatcattctttatttttttttggaactcattaaccatccccacctctcccacaaaccctgccactacccttcacagcttctggtaaccattcttctactctctatctccatgagttcaattgttttgatttttcgatcccacaaataaatgagaacatgtgatgtttgtctttctgtgcctggcttatttcacttaacataatggcttccagttccatccatgttattgcaaatgacaggatctcattctttttatggctgaatacttcattgtgtatatgttccacattttctttatccattcatctgttgatggactcttagattgctttcaaatcttggatattgtgaatagtgctgcaacaaacacctccaagtgtgtttgtagttgtaggcgaagacagacattcttctgcacacgtggtagtgaatgtgctcatagaggattgagctccagtgggagagagttcactggagggacaccgtacactgaactgggcctttagcaggggttagggaggcccttggagaggactatacaaacggtgttcagaattcaccaatggagcaggcgtagatagcatcacgtccaagggtgaggatgcaaggaggaaatggagccctttcaggagtcctaatccttttttgaagtcttttgccctttgtattaatttaatataattaatataatttaatttttataacagcctgaggggtaggtagaacctattgccattttacagataaactaactggggttcagcaaatgaagaaaattgcggttacttacgctgcaaacaagctgatagagcttggatttgaactgatctattggattcagaatctcttcgcagataccacattgcccttcatatagacaggagtaaaacctgcttatatgtagacagcttttttatggttttgtatctgaaaatccaggaccatgtattgtccatctctgatttctcatcttctcttcctcattcatttcttgtctgtgatttgttctttgggttgacatgatactccccatcctagagacagacagggtcttgtttgcatccaaaacaggaagagtttccacatctctgggagagctggtgtgtctctctgctgcattccttctatcttgggggcaggcggagcacaagtgtggctgttaggcacaacagaacagctgtagtcacccgccagttgacaccagggcacatggtgtcatggtcgcattactggagtgtgtctggctcaagctgctgcatgattggcatttattggggccatcatcaggggaagaattctatgtactttgtaagaaccatttcgtaacacctcattttccatttgccacatgttcttataaaaatatcatgaatccaggctttttgcatgaagccaaactgcagcttgcctgattcatgtactactcctgagggattctggttttgacttggcctcatgggcttccattttctgtgagatctttgaacaaagttatattttcaccctaatttcagtgtggctaaattaaatatgatgcatattttgttcaactaatatgctaagtatagaaaaaaggaccacaggggtaataaatcattaataaatttggtggtgacagctggtagattgttaccttgagaaaaataagagactcattgacaacaactaagaatagcaaatgtaaattctctttgcttagataatctttttatgaagcttcttcttttttttaatttaaaatgatgaaacgaaactaacaaagtatttccttttttgttattttgcagaaaaaaccactgtctgcaataataaaggaagtctgtgatgggtaagtgttactcaggatttatctaaggcattctagttgataaattgacaagcaaataatatatttccagtaggatagtaaaatattattcataagtcacccactgacttgctcaaagtcaataagaattactgtgtaggaatatcacacccttttccaacagaattcaccattagtcctcaaagagcagaaagtgtgaaatggctgttatgtgcacagtggggttggctttatttattttaggaagttgtgttccttttgtcctacctagcagggagtactctaaaggtttttgaggacacagtatacacttgatctggtataaactgagaggaccactcaggtccccatagaggatgaaagaattgaacagacaaggcagtgggtaattgtgctgctccgtgggatctcacactgatatgactttcctacttctttgtggctgctctaaagaatacaaaggaaatgtatatatggtagctgcatgactttgtttttttttaaaccagaactgtgaaaatagttgtgttaactgaaatttatataaggtctagagtacttaattggagtgtttcaatctgcatcaactatactgataggggattgtagaatacagagacaattaaaatgtgccaactttcaaaaacttaaattgcatttattttctttgtttttctttctttgcttcaatcccttaaaataagtagaattgtaaagatttgtatttaaatctcccacaccaagccttgaggatgaactgcttaaaggtgagcagtaggcctagcatcaggtctagacagtctacacatgaaatgattggtctcagggtaatggaaggtaggctaaagtcattttgctttaggaactgcattgtggtatatgttgggattggtccaattccaatcacagggtgcttagttcatccaacactaaaaaattgtaaaaatgaaaatggccactttcatttttctaatcagtatacgcttgtatttttaaggtggtctcttgccaaccatgaatattttgcactccagcatgccgatagttcaaacttctatatcacagaaaaggtaggtcaactacattatttaatatgggatacatattgaaggaaagtaaatcatgatgatgttttctttgttcgggcctagacatgcaggtctaaattttaggtctctactatccacgaaaatagagtctgtaaagcaaacaactgctactttagaatccacaagatgatatttgccagctcaagagtaaagaccaaatatgtttcgtgtcttgtttagcaactgcagttgccttctaacagtgaatatgtctctcttactgcttggttaaagaatttatttgatacttaatgacttagttgggttttcctttctcagattttgttttttcaaagtagcctctaacccttgcttaaagtacgtgaaataatgacaagaaaccttttcaaatgtggaattatgtatgtaggcactaagagtgttctatgaatcttgggaacccagctctctccttgggtgattttaaatcttttttagcaagattaaaggagaaggagggatttgtgaagacagcaatggccctgggagcaagtaaaattaatatgtacaagatccctgatagaggaagggcacactggaatttattgagtgcatactgcatgccaggaactgagccatgcacattacatctgtttaggatttcttccttaagactaacctgggctataaaaatactggctttggttaacaggtacgacactgagtcattgaggacaaatggttagactaatgcttcatacttgattctacaagaagcaagtttagacttttgtgcttctttgatttttgtcttttggaatttccacaatagtttcgcatccgacacaactttaggttgagctcactgaaatgcatatgagccagttttgtcttctaaactgataatcttgggggccagcagggagggaaggaacagccctggtaacagctgtcattataacaaggtggccagtgctgaaacagaagtgagtacaaagtactcttgaaggagggagaatcgggtggcctcaggcttcagtgtcttgcaggctttgtcccagtcagtagtccctagagtgactgtaattttatccatgaatcaggtggtggtagaaggtggaggcagtaacaagggttctacttccccttaggactcccttgctctaccccaaagaaggagggagggcattcagttcagcaggagagaggcctcaaaggcctgaatgcttctcagaaattgcttcgttcttcccagatgaacactgggaattttgtaactgatgctgttttcttcttcacgtcaaatgtttctttgtaacattgattgttacaaagctgggaactgggccaggtgcggtggctcacgtctgtaattccagcactttgggaggccaagggcggcagatcacttgaggtcaggagttcgagatcagcctggccaacatggtgaaaccccgtctctactaaaaatacataaattagctgggtatggtgatgggcgcctgtaatccaagctgttcgggaagctgaggtgggaggatcacttggacctgggaggcggaggttgcagtgagcagagatcgtgccactgcactccagcctgagcgacagagcgagactccatctcgagagaaaaagaaaaaacaaagctgggagttaacaagtgaacttgatttcctggcatgccttgtatattaagtttacctttgattcctttgacttaaacgtttagtttcctgtctctattttccctttgcttcagtttcttaatgtttttcatttattttatactgcatctatataatttgcatgctattctttgtgagattaaagaggttatatagaaatccaagttaaatgatagcagttaaaggtattgccatcatttcattcataccagttagtgagtagtgaaatcaattcagttagttgtcagagcattaaacactggaacatagtagagtagattaggtcagagtatatctcctgtgttgcttgtgaaatatttgttccacctacccacatgtataatacatgtagattacactggtgatttaccctgggttgtggtaaaaaagctgttgagtcgtgaatagttctggctgtgaataatctgtgctagtagatggcccctggtggtgtcctgtcttctgtcaccattgtctggagacctcagtgtagtgaagattactaaagatggggttctcagacttcatagagaacataagcatggtacagtgaacccttaaaaaaatatgtagggctttagatcccaaccccagagactcagagtgagtgggacttggatatagcctaggagttttcatttttaaggcaccctctgggcagtctcatgctggatacctggaaccactgggagaaacagccctggggcctattttctaaagagttggaacccatgtgtacaggacattatgccttctgtccagaagttgtgcacaaagttcaatttaggaatgtgggctgggcacgtggttcacatctgtaatcccagcactttgggaggccaaggcgggtgggtcacctgaggtcaggagttcgagaccagcctggccaacatggcaaaaccacgtctctactaaaaatacaaaaattagttgggtgtggtggcacatgcctgtagtcccactcaggaggctgaggcaggagtatcacttgaacctgggatgtggaggttgcagtgagccaagactgtaccactgcactccagcctaagtgacagagcaagcctccatctcaaaaacaaaaacaacaacaaaaaacaaagtatgtaggaatgtgtttgtgtgctgccatttcttggcataatttgaaaattattaacatcatataatggttatgcttttttcctgattaaaattcatatatactcagaacattcaaactattgagaatggaggaaattattattttatggtgtatcttagttattttctgggaatcttgttttgcctgaggacattcttgaagttgagtttataaaggactggccacaaagtctgtcatggagtttttcatcttcagtgggctgtagcagagattattcttttatgaagagtttaaggagtgagaagactcatcttccctatcgtagttctttgtttgtaaatacggtgtcattgctcttcctcatgcagctgtcactgggcacagctgtgggtgtgcatgtgtcacggagctcagcacgcacagagcaggagatgacggtgactcctggctccacagggtcgatcctgggctgccttcagtttgctgctttgtccatctagttccttgcaagtattcctaaaaatacagacattttttcccattttaaaaataatgtacttagcatcatcttggttacttacagcccagtgatttgttaggttatattttcatcaccatggtaaccagtgactcatttttgaaacttgtgcatgctgttagttactgattttcccttatatatgagactgtctctgtcttttcgctgaagatgaatatcaccttcagaaaatttttttcagaaaaaaaaaaaattctctagctggccaaacaatccaatagaaatagtggttgatggatgcttgtgattctcttctaagatcctccggaaggcactttccctgcttttctaatgttctccaagcccattttttgaaatagtcttcctttgcttattaggccattaactgaggtttttttttggtgcagtgggggaaaatgtcatgttaagtagcattcagcagaagcattgcttggaaatgcctcagagaaagttaagattcaatgattcacaagttcaaattctgctctagaaacttaactatttcagggtgatgtccaggagagagagagagggagagaataaaaaatgataagtgaagggtatgtttaggtggaatttgtcttttgaataagaattctactgagacagcactaagcattgttagtttatgaccctcatcacagtccaatgatgcaggtattggtgtcttcattttacgagaaaagtgagactgagagaggttactcaacaacttgtgggggttgtacaggtcagaagtggacaagctgagacttggacccaggtgggtctgaacccagagctctctatgccatctctgagaaaccctctgtaccattgcctcagccccaatttgtttatgatgccctttctttgggcatcactgtcatcaagccagtgatcctaatggtaactgcctcaaaaacaataaatacaggaagttacagactatgaacactggttaccagcttcagtctgtggcttccttattccttctgagggtaacttggaggaagttgtaacaggtaaccttccacttactagagcttcacaaagtgcatttatatttgcctttggtatggatcgtataactgcctaaggcagtatgattgcacgaataccattctttttagacaaacaggaaaattgccttgtcatccctaatcctaagcatgtatggagatgagtccccagaaaacacagggcacagtagaggaaagccatgaggaggttaggttgtgtgcttgtggataattgagattttattatgattgcaggatgatactcacttcctccatactgagacctactctagcatgtatgaagtatagtgatgtatcgctaatgtcttatttagataaattccatatcttgtaatcacagaaatacgctaagcctcattcaggccctctctgcaaagctggccccaggcacctttggtaaggaagtagggttgtttggggggcacccccttttttgtctttcccacttcctaagtgccctgggttctcagacagcccctgaacctcccagaatccctggcagccagaattgtgcactcccttggatttgtacatttcattctggtcaggagatgattccactattttgcagaattcagttcaactatcatgctttggtagatccagctgtaagtaagcagggtaatcccagtctccagaaaggattgaagcttagaggtaagcaaggatgaaggcctgggagggaatcaaaggagatggacagagagaagcctgcagtcctattttccagctctggtttctgtgcttcctgtctttgcatccttgtgagagacctgctgtgacttttcagtccccgcccctttgcttaaatcactttatgcttgtctttgttaccctcaatcaaagagctttctctagggcaggcattttaatgtgagcaaactcacgcccaggaaagctgtaaatttcctaaaccagccaaataccctatacaacattccctttcgtgctgcctttggtgaaggactctggatttgatcaactgaagtcactgtggctgcctcagcaagacacaccagcagccctgggctagctcctgttgggccagtccacaggcaataatgggtggagaaaaatgttcctgcctgatatggtttggctgtgtccccacccaaatctcatcttgaattgtagctctcataattcccacgtgttgtggttgggacctggtgggagataattgaatcaagggggaggtttcctccgtactgttctcgtggtagtgaataagtctcttgagagctgatggttctataaggggaaacccctttctcttgattttcattccctctcttgtctgctgccatgtaagatgtgcctttcgccttccaccatgattgtgaggcctccccagccacatggaactgtgagtccattaaacctctttttctttataaattacccagtctcaggtatgtctttattagcagcatgagaacggactaatacactgcttttccctttggcctgtccctttatctcttcagggtttcctgactccaagcatttctcctgtgctgcctcttcttcctgttctgagaccctgctgcctaacatgcctaacatgcctaacatgggtctcctctgttaaacccatgtcttgctacccaattatttcctttttgcctgatgaccaaacctgatttctgctatggatgttgcgtggatgcccaaaggctgcttgtattcctgtccccagcctttggcaagcactggactctcctagacaggctgcttatctgggctctgccactcatcatctgggcagccagagagaaatggacatgctgggaggaaaaaagccacatgtgaacacatccaatagaggagactagaagtgactccccagtgtgtgccaggtactgtgctaaaccctggggatatctctaaccttcctgataatcacagacaaaataaatctttacctgaaattaaccagttacagtgacaatgagtgccacaaaggagaaatgtgagtgtctgggcctaattaagccttgaggaagtgacatttaggcagagatctagaaagaaaggagggaggatagatgggaacctcttaaagtgggctagattgatggtgtgcagagaaatagtgataaagccagcgtaggaccatccagatgtggctggaaagttttgcatatgccctgattgtcaaggctttttaaggtcatcttaaagatcttgaacttcatcctaagatcatagggaagccttgagatggttttaagctggacttgatgacaaacgattggattgcagacttccttgtgattactctgaatacactctgttggaagaattgtcagcctatggcagaaacagtgagaaaactgttgaatggagaggaaaagaatgcatgggtgttttattttttaattaattaattatttatttatttgagacagagtcttgctctgtcgggcaggctggagtgcagtggcgcaatcttggctcactgcaacctccatctcccaggctcaagcaattctcctgcctcatcctgccaagtagctgggattacaggcatgtgccaccatgcgcggctaatttttgtatttttagtagagagggggtttcaccatgttggccaggctggtcttttaattcctgacctcaggtaatctgcccgcctcggcctcccacagtgctgggattacagacgtgagccaccacacccagctgcatggttgttttaaaattcgcatagagattgacaacaaatgctgggtagcactttgagtccaaggaaaacatagaacgagatgatagtcttaaatgtctgccttcgaagagcttactatctattatctccttgacagcttggctgagggtagtaatgatacactgcagttgaataaaacagctcattttatttatttccaaagtgatatcttcttgataaatttgcctgtttacacagcctgataaaatgttaatattcggttacctgatgtattcattcctgtcctttctcatgctgctataaggacatacctgagactgggtaatttataaaggaaagaggtttaattgactcacagttccgcagggctgggtaggcctcaggaaactgacaatcacggtggaagggaaagcaaacatgtccttcttcacatggaggcagcaaggagaagtgcagagtgaagtggggagagccccttataaagccccttataaagccatcaggtctgtgagaacagaatggaggtaaccacccccatgattcagttacctcccatcggcacgtgggaattatgggaactacagttcaagatgagatttgggtggagacacagccaaaacatgtcacctgactaatttatatcaaattttaacttcccctttggacatacctaattttaggattcagacactcctagcataggactttaagaaggagaaatggatttgcccagatttgacagttaatgtgctgcaatgagaaagataattaaggtacagtccttgtctccatagagttttcaatctagaggaagattgggttgataacaattccagtcattggggtaattagaaggggtcctgtgtgaagagattattaggaatatgatttttgagtcactaggtttataatttgaccatatgattctgtgtaccttaaaaaaccttttgactaggatatgaactcttctttttttttaacatcataattgaggtaagatttatacaccctagaatttgcccatgtaaagtgtacaatgcaatggtttttattatattcatagagttctgcagtgctttatttttttgatagcaaagctgtgatatttccacctccagtattttcatcttccaaagctcttagccttaaatgtagattttggctccaaatttagagatttggattctgtagttcaaggctaaggttcaggcatctttaacaagtacagctggtcctagtaccaagctcaaacactttccagtggaacagtgagcagcctttggatctttccactattcctgcatgagatgaaaaaccatattttgaattcatactggcttgtaggcatggactccccatgcactccctgagctgagggtgtcattctgattggtttccactgttgccaacagagaatgaagtccaacctcctttcttaagccagtgttcaaggtgcatcacaagtcaacattttcaattttattctttctcttattccttcaattttagccaaactgctgtagtgttctctaaatatatgttgatttgtctccttggtgtagctttactaacctggaattcagttctctttatctccctcctattatttcaggtactagattaggtgctaaggataaagagatgaaatgacatactccttgcttcgaaagctgaatcttagaaacaaacacacacctaggagcaatatcatttaaatgactgccatttcaggacaacagttcatcctcttcttaccaatcctaaattgtttgagctggaagaaaccctggcttcttgcctaacataactgtagccccacttttggagattcgtctcttaattcagtcctcttataaatctctacccctcctctctgctgctacaggtattattgtctactagttctttttctctcaggtatctgttagctgatcaggacctacatcgctttatcgttgtcttgaactgttgtttaactatttctgtgctgatttatgttttcctctcagcaaggttccaagtactttacaatcaaaaactgtatattccagctctgtgtctcacgtggttctgtgaatataatatgtaggtgttggaagattgtgggttttatgttacatagttttctttgtaagataagaatacaattagttgcttaataaattatgtatgatgttggttaattcaattaccagaagacgcacatacacattaagattattcacagtggagaaattgtagagtgaataaatgaatcttaatgttcctcttagagtcttaaaatggtgttaaaaagtttagtttggctttcagtctgcaacaactgattaattaccttttgaaaagaaatatgcacatacacacacacacacacacacacacacactatctgtactgtgctggatattgaccaaaaattcttaaaagatacaagggaaataaggaacagagaccgtctggtcccttataatatacaaataaccatcacgatgcagatcatcaaacagtaatacagtttcaaagtattatcacttttgttctcattatagcaaataacgtcctctaagaaccaaatggtgtttgtgagagataatgtactcaaaattatgttactgctcaattttgagaaagtgagttttactttatttcaccctaggctaagatccattaataatcacatgactcaccatcttcagttctttatttcaggcagttggctctgtgggagcagcgtcacagaagagtagagagaattgttggcttacatacatacaaaactttagagcttctgtgaaggaaaacatgggcactgacttagaaaccttgccgatattttctcccctaccccccacacgctttttcattaaataaaggaaaaactttgcacagtcacactccactgtggtgacacattttccaataaccgaggaacaactgaatgcaactatttgcagttagaattctctgtacgtatgtgaaaacaagccacttaaaacaaaacttggagcagcaattttggaaaacaggaaaaactctgaaatatgccatctagtttgcttgcaacacggaaatcgtgaaccaagagtgttttactttcttttctttctatttttttggagacagagtctcgctctgtcgcccaggctgaagtgcagtggcgcaatctcggctcactgcaacctccacctcccgggttcaagcgattctcctgcctcagcttcctgagtagctgggattacaggcgcacgccaccacacccagctaatttttgtatttttagtagagacagagtttcaccatgttggtcaggctggtcttgaactcctgacctcaggttatccacctgcctcagcctcccaaagtgctgggattacaggcgtgagccgccgtgcccagacgcctctgccctttctcaatccatcaagcacaacttgtgaaaattgaagtgcatatgtacacacacacacgcacacacacacaccctcacacaccctcctcagattgtcctgacttcccctaggagctatccagccctggcattgggcttcagccagccattcctctttccatcatcgtcacccctcttttgccctggtgtctttgctcatagtgactcaaactaaattggcagtagactttctgaagctgtctctaaaaacatttttgggtggttttagacttttctaattagagtttgggaactggatgggagctatcattttaaatcatttgctatgtttcctctagagaggacttggaagcatatatacttatttcaggatgaagaaaaaaaaacagcctaagttgagtcacctaaatgagagggagctcggaagagcagggcagcgaccgccaccagcattactcagatgtcggtgggttttatgacatgttatttaatgtttacactgacggttggatagaggctataacaagatgattacacaggcagctaactttgtagcttaggctccctagcttatgcttggtaagatgcaactgcctctagaattgcaggcaaggacaaatgccagaggtcatgatcattccatgttctccagttcagctatgaaactaatgaatagattgactgaagtactgaaacatttaactgtgtaatgctcagatacagaatgagtgacacgtgggtttcctccaaacaggcacttctttaccaaaaatgaccctaaaaacaccagaacactttttccaaacaaaactaactacagtgaaaagcaaaaaccattattagtaaagaagattacttctaagaatggctctgtgattcttataatttgtttcaaggccagaaacttaattgcagatcttctaagcatactcctgttcatgtttttatacttctaaaatgagatttattgttgaacagcaatcagattatgttgggcaaagttttgaaatatacactgtgtatatttttgtgtgtttgtgtgtcatgggtaaatgaaatatcgatgaaaaaatagtgactttactacttggaatgcctttttgttgtttttagtctgttttctatttttaaaatatttgttagaacccatcaggatgattttatgactactgatggttgtgctccacagatggaaaaacatttcattacactctttgctctacaaggtcagaaacaaagctagattcctttacttcggttatcccagtgtctagcacagtgctctataaacatttgtttaatggaataacgaacatctactatgaacataaactggtgacccaagggcaggcatagggggcaggcatgaaaaagaccaaaaagaaaaggagaaatagaagaaaggtagaaagttaggcggaaagtctggggagagataagaggaagatgaacttatctctacccaggaaaggtagtgtgcctgcaactcttttctggaggtgacactcagtaacattagggccctaggttgcccattctttccactgtgatcagaatcaagttacaataatttattgtctgattgtttctttctgatccccattgttctggttatctattggggcattaaaaaacaccccaaatttagtaacctaaagcaaaaattcattatcagtagagatgattacttatactcactgtttctccaggccaggatttggacatgacatcttcccatccatgatggcttgtctcttcttgatgtctggagtcacaactgggaagacatgaatagctgggggctagaatcatttggaagcctcttcttcactcatgtctggcttctgggcttggatgcctcaaagactgggctcagttgggatggtaaacttgagtgccctacatatgtcctttccatgtggcttgggcttccccacagcatggtggcaatgttctgagaaggagttccaacaagagggcacttccagagagggagtgtttgaagagaaccaagcagaagctgcatggctcgttatgacctagccttagaggtttacaggatcatttctgctgtactttatctctccaagtagtcacaagcctgccctgattagaggggatgagacatagcctggtgcatggcacacacctgttgtcccagctatggggactgaggtgtctgcaggctgtgttgaactgtgattgtacctgtgaatagccactgcacttcagcctgggcaatattgctagactcttgtctttaaaaaaaggggaatggaggtgggacatagactcctcctccccatggaaggagtggcaaagaatctgggggctttttaattaaaccacccatcatttctttacatttctctttcagggaaaagttgtcagataggtatactattttccagaagttatccaaaggttaaactgtgtcttttacttttgcaattatttaactttttaaaccaagaggaaggacaaagagataaagtaagaaaaatagaagaaagtgtgcatcatacaaacatagagcagcaacagtgaggcaattttctccattgataaatgatagagatctattgcttcttttaaacgtggggtgggggaacaataatcgtgtaaaccaagaaatttagagggagtttatttggcactttgatatttacaccttcttttgagcacaattttgggagaaattgggattcaccgcctttaccatgtctgaagattaaagtcaaaaaataaaagtgactgctttgttgccatcaactgcacttgtaaagcagtaacgattctttatttttccaaggcagccttgttcttggtgctttgactgagagaaagggctggagaggggtgggtgggtgggtgaactgcagctctttactgtctctgggaatggcgtaagtcaaggcaaccttggtcatcaagcacaagcttcatttgcttttgaactcctatgggggagaaatactacaaaacacaaactttaaaagtgattcattgtgatcttatctgagatttttcatttcattaggagataaagaggagagaataacttcctcttccaatagtttttttttttctgatatattctcatttctcattttttctctgctccctaatgcttatttttctttctcctctggcccttttccttctgattgtttttccttcctttccttctctccatgacttcattcttattttgctccatctcttcctcactaccatctcctttattgagttattagccatctttttaaaaacttcctagtcttacaacaaaaaatgataaaggggatatcaccaccgatcccacagaaatacaaactaccatcagagaatactacaaacacctctacgcaaataaactagaaaatctagaagaaatggataaattcctcgacacatacactctcccaagactaaaccaggaagaagttgaatctcttaatagaccaataacaggagctgaaattgtggcaataatcaatagcttaccaaccaaaaagagtccaggaccagatggcttcacagctgaattctaccagaggtacaaggaggaactggtaccattccttctgaaactattccaatcaatagaaaaagagggaatcctccctaactcatttatgaggccagcatcattctgataccaaagccgggcagagacacaaccaaaaaagagaattttagaccaatatccttgatgaacattgatgcaaaaatcctcaataaaatactggcaaaccgaatccagcagcacatcaaaaagcttatccaccatgatcaagtgggcttcatccctgggatgcaaggctggttcaatatacacaaatcaataaacataatccagcatataaacagagccaaagacaaaaaccacatgattatctcaatagatgcagaaaaagcctttgacaaaattcaacaacccttcatgctaaaaactctcaataaattaggtattgatgggacgtatttcaaaataataagagctatctatgacaaacccacagccaatatcatactgaatgggcaaaaactggaagcattccctttgaaaactggcacaagacagggatgccctctctcaccactcctattcaacatagtgttggaagttctggccagggcaattaggcaggagaaggaaataaagggtattcaattaggaaaagaggaagtcaaattgtccctgtttgcagatgacatgattgtatatctagaaaaccccattgtctcagcccaaaatctccttaagctgataagcaacttcagcaaagtctcaggatacaaaatcaatgtacaaaaatcacaagcattcttatacaccaacaacagacaaacagagagccaaatcatgagtgaactcccattcacaattgcttcaaagagaataaaatacctaggaatccaacttacaagggatgtgaaggacctcttcaaggagaactacaaaccactgctcaaggaaataaaagaggatacaaacaaatggaagaacattccatgctcatgggtaggaagaatcaatattgtgaaaatggccatactgcccaaggtaatttacagattcaatgccatccccatcaagctaccagtgactttcttcacagaattggaaaaaactactttaaagttcatatggaaccaaaaaagaggccgcatcgccaagtcaatcctaagccaaaagaacaaagctggaggcatcacactacctgacttcaaactttactacaaggctacagtaaccaaaacagcatggtactggtaccaaaacagagatatagatcaatggaacagaacagagccctcagaaataacgccgcatacctacaactgtctgatctttgacaaacctgagaaaagaaatgggggaaaggattccctatttaataaatggtgctgggaaaactggctagccatatgtagaaagctgaaactggatcccttccttacaccttatacaaaaatcaattcaagatggattaaagacttaaacgttaggcctaaaaccataaaaaccctagaagaaaacctaggcattaccattcaggacataggcatgggcaaggacttcatgtccaaaacaccaaaagcaatggcaactaaagagcttctgcacagcaaaagaaactaccatcagagtgaacaggcaacctacaaaatgggagaaaattttcacaacctactcatctgacaaagggctaatacccagaatctacaatgaactcaaacaaatttacaagaaaaaaacaaccccatcaaaaagtgggcgaaggacatgaacagacacttctcaaaagaagacatttatgcagccaaaaaacacatgaaaaaatgctcatcatcactggccatcagagaaatgcaaatcaaaaccacaatgagataccatctcacaccagttagaatggcaatcattaaaaagtcaggaaacaacaggtgctggagaggatgtggagaaataggaacacttttacactgttggtgggactgtaaactagttcaaccattgtggaagtgagtgtggcgattcctcagggatctagaactagaaataccatttgacccagccatcccattactgggtatatacccaaatgactataaatcatgctgctataaagacacatgtacacgtatgtttattgcggcattattcacaatagcaaagacttggaagcaacccaaatgtccaacaatgatagactggattaagaaaatgtggcacatatacaccatggaatactatgcagccataaaaaatgatgagttcatgtcctttgtagggacatggatgaaattggaaatcatcattctctgtaaactatcgcaagaacaaaaaaccaaacaccgcatattctcactcataggtgggaattgaacaatgagaacacatggacacaggaaggggaatatcacactctggggactgtggtggggtcgggggagggaggagggatagcattgggagatatacctaatgctagatgacgagttagtgggtgcagcacaccagcatggcacatgtatacatatgtaactaacctgcacaatgtgcacatgtaccctaaaacttaaagtataataaaaaaaaaactcttaaaaaaaaaaaaaaaaacttcctagtcttgtccacctacttttattctacctttttgatgttcaggtcccccctctcttgtagctctagacttgtcagcactgtagttaggtttagatttttagatgctaaaaaatgaggtaccactttactgatttaatacaactagtataaagcattcttttttcagtgtctgctgctctgaagcaagcagatacaaaatctcaagtatcttcaaaaaacatttacacagattaggcatattgagacatattagaaaaaagtaaattaaaaaaagatgaaaatcctattacttagagaaaaccaatggcattctactgtatctacttcaaacatatttaagtctagaagtatatttgtgttttacaagtgtgtaaaatatacacattgtttcacagctctagacttaatatatagcagccatcataacacagtagttagtatactcagcctactttattatataatgaggattaaacaaggtaatgccaacaacacagtttgcaaggcacttggcccatagtcattcctcagtgagtcatatttcctatttatttgtcaaactttcctaatggctgaaaagaattcaactcaattcttgaagtcagttctttgtatttggacttttaaattgtttatcttcctctctctgtcttttttttttttcaagcagtgctaaaggggccattcttcaaagtaagtctttatgtagttccttaactatttcattataaactattgataaaagttgaatgatgagtcaaagaaattgtgtcatctaggtatatgtggccatcatttatggaggaccccctaggtgccaggcactttcatgagttatttcatttaagcttttaggattcacagtagtcttagacatttgggagttttaggtcacatagcttctgaatgccggaattggaactgaaataagatcttttatattattgtgaagaaagttccatttcagcaacttttcacaggtgcttcaggaattgcagaaggagttgacttatacaacctttaaaaatattgttttgaatgatttaaacatgaataaaacaatcagcgtaaactctgataatggataggagcacagtgaaggcaagctttattattattattaagatgccaggctaagttgattttgagagagcctcaatataaagcatttcatttcctcctcccccatgcatatatttacacttcttataaaatatgtcattgactgggaagattgcttttatcttaaatcaggcatgaatccacccactcaagaaaaatcatctcagcaagttcgctgctgctgcacctgtgtccttggctcatggaaggtcagggatagttcaggcgtattggcttgagagcatgtcaggtgtctaatgaaagagaaaacctaattttcctcttttctgtaagttttgagtacttttccccgatttccagtatttattataagaaaggagttgagattagatgttatttatacaaatttacatgatgaaataaatatccaagtatctggaaagattcctgagatttcaaggtaaacttttaaaagcaatttccagctaatgctctgtgttgacagataatgccttgtgtatggtaagtggaattctgagatggccccaagattcccacacccctagtcttacacacccatctaatccctgtctcttgaatgtgatctgggcctgtgaataagaggggctatcacttctgtgattgtgtcacagcgtatggcaacgaggattttgtaggtgtcattaaggtcttcaatcagtcgatttgggagtaatcaaaagggagaatatcttggtaggcctgacctaatcagatagacttttaaaagaaggtgaagcattaacgagatgtcttcctgttggccccgagaaatagcgaactgccatgttgtggagagggctacagagaaaggccctaagatcaacctctcagagctgagaggggtccctggccaacagccagtgggaaatagagggaagagggatcttggttgtgtaatcacaagaaatgaattctacaacaacctgagtgaatgtggaagagggctctgaatttcaaatgaggacccagctgactgacaccttgatttcacccctcacagacacccagctaaaaggtgctagactcctgatccatagaaactgtggagacagctaaaaggtgctagactcctgatccatagaaactgtggagataaatatatctgtgctgttttaaactcttagatttctggtaatttgttatacagcaatggaaaactggtaaatacacggtgggaatgtattcacgtttcctccacattaagtaaggcaacaacacacaaaagcgtattgaatgtggaagcttgctatattattataatgatcacctataatatcagagattgagtttttatgttaataaaagtcttattattcctgcctattaccttaataaaatatacattgacaaacctaagctcaaaaaacatattaatgttgatacaatacttctttctctatttgggctctgaggcattatctgagctttttttcctccttctagaacaaaaaggttccattatttgaaaacaactgtcttgactaataggtgctttttaaaaagactgcattttggttgttgtaagaatgtaactgttggcagggaaaggaaaagcaagattgtgcaaggctaatttatagtcagtacattgtttcaaagtgtatgtttatctttaattgttctctcattacaaagtaatgcatagatgtaagaaatccagccatcgtttcagacagatgagttttgtgctagtgatactgttttttaaagtcagaattcatttaagtagtaatttaaaaacttttaaatcatacaatatttcaaacatatcaaaaaactacaaaaaatgatataactgacacttgtacagcccactgtctggatgttgatagatgttaacattttgcctactgttttgcatcacctttaaaaaaccttccaagcatagctaaaaccttactctatcaaattttctatctctccttctattcctctctccccagaggtaagtagtagcctgaaattgaagtatatcattctcatgaatgttttataggttttctacataggtatgtgcttatgaataatatcaagaattgttttatgtgttaaaatttaaagcattgatatcctactctaggtaacttttgcatttaattttttcactcagtaatatttttgagatgaatttttttttttttttgaggcggagttttgttgttgttgcccaggctggagtgcgatggcggattgtggctcattgcaacctccgcctcttgggttcaagtgattctcctgcctcagcctcccaagtagctggggttacaggcgcctgccaccacacccagctaatttttgtatttgtagtagagaaggggtttcactgtgttggccaggctggtctcgaacttctgacctcaggcgatccacctgcctctgcctcccaaagtgttgggattacaggcgtgagcccccgcgcctggcctgagatgaatttatgatatcccatgacataaataaaacacagttgatttatccatttttttaaccaataatcacttgtttcctcaattttggtatcacaaagaatactgtactatgcatgtatttgtgtggggctgtttaaaagtttctctagaatagaatgtagaaagcttttggattagagggaaggtcattctcaactttactgcttttcaaagtggttctactagcttgcagtcccacccgcaattatcagcttttctattcccgtcaccctgaccagtgcttgtttgcatagcctggctaatgttagccatggctaggacaccatgggacttctcctgtccttttttttttttttttaaacggcttctcgctcagtcacctaggctggagtgcagtggcaggatctcggctcactgcaacctccgcctcccgggttcaagggattctcctgtctcagcctcccaagtagctgggattataggtgcaaaggagagaaaacccaagcctatgagtagaaaagtgggttatgtgcaaagaattaaacaggcagatcaagatcttcttgcagtgtgaagtcaacgtaaacatagttccagatttgtattgattctgaaaatatattaatcttttacctgtattttaaaaagtatatgccatctgaatgagagaaaacatcagataacaaattcaagagtgtaagttttatggtgtcaaaagggcagtaacaactgataactcttagttcaaataactgtataaaatttactcaatgacaccaaaagcaaatctcaattttatatatatgaaagaagatatagactacagaagttatttaattaaaatcttagtggaaaacttaaaattatattgtgaaacccaggaatgaaattgattatgatagaaaaaagtttttaaatttaacagttccttttttttttttttttggatatagagtttcactcttttttattattattattattattttttttttttattgatcattcttgggtgtttctcacagagggggatttggcagggtcacaggacaatagtggagggaaggtcagcagataaacaagtgaacaaaggtctctggttttcctaggcagaggaccctgcggccttccgcagtgtttgtgtccctgggtacttgagattagggagtggtgatgactcttaacgagcatgctgccttcaagcatctgtttaacaaagcacaacttgcaccgcccttaatccattcaaccctgagtggatacagcacatgtttcagagagcacagggttgggggtaaggtcaccgatcaacaggatcccaaggcagaagaatttttcttagtacagaacaaaatgaaaagtctcccatgtctacctctttctacacagacacggcaaccacccgatttctcaatcttttccccaccttgcccccctttctattctacaaaaccgccattgtcatcatggcccattctcaatgagctgttgggtacacctcccagacggggtggtggccgggcagaggggctcctcacttcccagtaggcgtggccgggcagaggcgcccctcacctcccagacggggcggctggccggacggggggctgaccccccccacctccctcccggagggggcggctggccgggcgggggactgaccccgccacctccctcccggacggggcggctggccgggcagaggggctcctcacttcccagtaggggtggccgggcagaggcgcccctcacttcccggacggggcggctggccaggcgggggactgaccccgccacctccctcccggacggggcggctggccgggcagaggggctcctcacttcccagtaggggtggccgggcagaggcgcccctcacctcccggacagggcggctggccgggcggggggctgacccccccacctccctccctcccagacggggtggctggccgggcggggggctgacccccccacctccctcccggacggggcggctgccgggcggagacgctcctcacttcccagacggggtggctgctgggcggaggggctcctcacttctcagacggggcgtccaggcagagacgctcctcacatcccggacggggcagcagggcagaggtgctccccacatctcagacgatgggcggccgggcagagacgctcctcacttcccagatgtgatggcggccgggaagaggcgctcctcacttcctagatgggatggcggccaggcagagacgctcctcactttccagactgggcagccaggcagaggggctcctcacatcgcagatgatgggcggccaggcggagacgctcctcacttcccagacggggtggcggccgggcagaggctgcaatctcggcactttgggaggccaaggcaggaggctgggaggtggaggttgtagcgagccgagatcacgccactgcactccagcctgggcaccattgagcactgagtgaacgagactccgtctgcaatcccggcacctcgggaggccgaggctggcggatcactcgcggttaggagctggagaccagcccggccaacacagcgaatccccatctccaccaaaaaaatacgaaaaccagtcaggcgtggcggtgcgcgcctgcaatcgcaggcactcggcaagctgaggcaggagaatcaggcagggaggttgcagtgagccgagatggcagcagtaccgtccagcttcggctcggcatcagagggagaccgtggaaagagagggagagggagaccgtgggcagagggagagggagggggagggggagggagagggagcagagtttcactcttgtagcccaggctgcggtgcagtggtgtgatctcggctcactgcaacctccacttcccgggttcaagctattcttctgcctcagcctcctgagtagctgggactacaggcacccacccccacacctggctaatttttgtatttttagtagagacggagtttcaccatgttggccaggctggtctcaaactcctgacctcaggtgatccacccacctcggccttccacagtgctgggattataagcatgggccaccacgcctggcctacgtgtctttaatttgcatttctccaactgctgaggctgagcatatttttctgtgtttattatctagtcagttttcccttctataaactgcctatacattctttgtccaatagtgggtttggagtgtttcattgtcatggatttacaggagttgtttatatgttgtggacacaaattctttttcctaaatttctacccagtccatagttgttttttctattgtgtcttttgtcaaacagaggtttataagaccattttaatcaatcagatttgtccttttttcccttttgttacttgggctttttgcattttatttaaaagcactttctctagctatatattttaaagagattctcttgtgttttatttcaaaagttagaaagttttgattttcatataggtaatcaatctattttgaaagtgtgtgtagggggtattatatggcgatctaattttatcttttgatggagacagccagttgtcttaccactgtttattgcattattcattacctatctgccacttccatgacttgcattgtcacttctttcatatgtcaaggttttgtgaatataggggtctctgtggctctctattttgtaccattatcatacagctttgatagcttccaactaacaagactagatttctagtagagtgaatgtctgtgcctttttcttcctctttctcttctcttcttcagtgtcatcatcttcttgttcttctttttctcttcctctgttcttcctcttcttctctgtcatcatcatcatcatcatcaaaatcaccctgcttctgccttttactcctccatatgaattttagcatatgcttgtcaaatcccattagaattttgattaaaattgaattgaatttatggactaattttgggaaaaatttgcattctctaagatattgcctatcccatctatgaaaacaatatattgttctatttattagaatattctttaacattttcaataaagcttaaccatttttgcccttaaagtttttatacgtatatttagtaagatatatgcctaggtacctcagaattttgtatccatcataaattgtacgtgttttaagcacttccattgtttatagctgtttatatagctcttattgaatagtttctgtgtatagcaaattctgttgagcttaattaatttctgcaaatacactgagatgtatttatcatcttttaaagattaacaaaataagtatcagagattacataattttaatatgattatatatgactagtgtacaccctggatttgaacttagttttagctaaatctttacctttttctgagagcctttccttttacatcagctaatgtttctctgacgtatgttatcttgtttagcaggattttttttaatactaaaaaactaaaatctcattatagagcctgtatgtgaaagaggcacttaattcacccagtatatgtctcttaatatcagttaattaattcatctggatagccacattcatggcagagagtaagtctataaaataaatgctttttctggtcattatctttggatcagctcttaaggaaaacacccatcctaattgaattagcgtggctttcccaattgctcactgtcttacttatgcttaggcctatgttgcattagtccctcccaacagatctggaggcaaggcctagagcatagtgtgggtggtccagggccaaaggagaaaagctaatgtggtaaggtaagatgaagacaagtttttaatgcttgtaatgttgaactgtttaactctctcctctgacacctagtatccctactaactcctccagaaaagcctcagattttaatttcactcctggcaaaaaaaaagagaaaatagagaagatagagggaaaaaaatctcgaatgcaatgcaagtgaaagcccattctttctctggtgtgtgctgctgggttgtttgcttccagctgtcagtccagatcccatttgtctggggtttctttctggcatcctctcttcgtctcatactaggcccttcctcttagggctggagcaggtgcatttctgggaatggttctggacagctttttgagcctcagagcacagtagttatagatgcctggggctgtttgtaactttgcttcagtgttgaggctgcctggtgctgtggcgttagtgaacagctgatgacagatggttcatttctgtgcaggatgtgttgcagacatgtggattggtagtggaacctgagcaaatatatctcaactctctcttttaaaaaatgcttaataataagtgtgcccatagtaggtatgaaataaatatccactcgttgactgaaggttatagcatagggaaagaaaggaaagatggtttgaaatttatttggattgtgagagaggggaaggggttgttaccagtgagctttagtttatagatattttcactattgttccagactctgttatgattataatattcattctattcactcaaaaagcatttgatgaacacatttgatataccaggcaccattcaaggcactggtgatgaactaaacatggagatgcccattcttcttgggcatctgttcttttgggtgtggaaactgacaggaaagacttagaaaacgaacaaggcaattaattttagatcgaggtaagagctatgaggaaaatggagtaggacagcccccaaaaaagacatgggggcagattgtggtaggtgttgctgctttggtttaccctgctaagcgcttggccatagaatataggttcaagtatgacccagaaatatgacttgcctaggttcatgtttataaacaaccagatttcaaaaaataagactacatgtgggtgtacatggtttccagaattgagggcttaaggcctttcatcctccaaccatatgagtgtcaaaacttatacactaaggcagtcattccgccatcaagatttgtgctaaccaaggttaatgtctgggttctccatcttcgcaatgtggttgtgccagcttggggcaatcagcctcactctgcaaggccctggttgtccatctgtaggccttggccaagattgctttaaggtatcagggaaggtctctttaaagaggtgacacaaggtggggcatgtaatcctcatgcctgtaatcccagcactttgggaggatgaggtgggcggatcacctgaggtggagagttcaagaccagcctgaccaacatggagaaaccccatctctactaataatacaaaaatgagccgggcatggtggcgcatgcctgtaattccagctacttgggaggctgaggcaggagaatcgcttgaacccaggaggcagagattgcagtgagccgagatcgtgccattgcactccagcctggggaacaagagtgaaactccatctcaaaaaaaaaaaagtgacactttgggaggccaaggctggcagatcacctgaggtcaggagtttgagacccacctggccaacatggtgaaaccctgtctctaccaaaaatacaaaaattagctgggtgtggtggtgcacacctgtaatccaaactacttgggagactgaggcagaagaattgcttgacctgggaggcagaggtttcagtgagctgagatcgcaccactgcactccagcctgggcaacagagtgagactctgtctcaaacaaacaaacaaataaacaaaaaaaaggtgacatttgagccaagactggaggataacagggagccagaccctagcgttgtaggaaaagaaacagccagcagaaaagtcctgcagcatgaaagagcttggtgtgttagagaacaaaagggaacaggatagtgagctggaagtgagaggaggtaccagagaaattgtcgatgttgactagggctgcatcacagtgtcttctaaactatagtgggaatttggatctccttccaagtacaatgaaaagctactattttatcctggggttcatgaacttatgtaggaggaacactacagccatataaaaacgtaaacttttcattgcttgaatcacaaatgtcagcaacaagccatgataggataagcagtatctgtgcctttattatgaacagaaattaaagtacatccatttattactgtttatcacagttatctctaaatatcatttatcatcttatgcctaattagaaattatggtagttattagaccttacaacagatcttgttatttaatgctttaatacaggggtcagcaactatagcctgtggactatgtccaagctgccacctgtttttgtacataaaacttactggaacacagccaaacccatttatttacatatcacagttgcaacagaggtattctagcctgcagtacttaaaatgcttactgtctggctggaaaaagattgctgacacgtgcattgataaagcagcatatatattactatgatacaatttttttttttttttttgagaaggagtctcttgctctgttgcccagactggagtgcagtggcgtgatctcggctcattgcaacctccacctcccgggttcaagcgatccttctgtctcagcctctcaaatagctggaactataggcatatgccaccacgcctggctaatttttgtatttttagtagagacagggtttcaccgtattggccaggctgctgtcaaactcctgacctcgtgatctgcccgcctccacctcccaaagtgctgggattagaggcatgagccactgtgcccagcctatgatacaatttttaaaatatttggataactgtttggtttctttgcaagcttatttattttattttatgcatttaaaaacattctgaaaagaagatccatagacttcaccagagttctctaagacatccatgactaggaaaaaaagagaaagaaaaagaatccctatatttcattatctaaggctggggatccaaatgggcggacttgtatttatttcctctgcctgagattctctcccttctctccctccttctttggcagattttccatttcttttggagtgtggtactgaagctgcctcctttttatgaataatatattggatcctacacatttactgaatgagccaagcagaggctttattagcagtgtccagtgtaatgcccataataacactgtgtggtgtgggtctgactgtcttcacgtggcactgcagaaagggaggccccaagacgttgtcttgcccatcattcatttaccctgtattcactgagcacctattgcttgccaggggctgtgccaaattcccaggtgacaaagctgttactggtgaagccaagttttggatcaggcccatctgacactagtgtctgggtggctaatgccacagcaggttatgttcaggatgtcatgtgacaccctgctgcctcaagcttggccactcctccatccctagtgtttccagccgcattgttccttggctgtgagctgtaaatgtttttatctcatcctctctccacagaccactatttgcattgttttgcctagaatgggccatggagttagtattttcccagctgtagtagcatcttcagtgatccctgctcatgccactggaatggccctttaaaaatgttttttttttttctttttacaagcatgagtttctttcctataagtgcagctcttttttcttgtctctgtagcactttgtggctttctgagaccacaggctctaacttgcccattgcaccccatgtttaagcatttgcacatgtcgtttgattgaggggtaagttaaaactgctggcagtgggaagggctggcaatcaggtctcttatctcaagtggatggaaaaataaggctgttcaacgtggttcgctcaactcgtacaggtcccttctgtgcaaaaccagggagattgcttctcccctggaaacacaggcactcctcattggctgggttgggcaaatacccataatattaggcatttttcctgcttttttccccttcttttgcaggttgcaagtgatggcaatgtacatgggattctcaaactggtcaccagtacttagtgcatgaacacacattatattctatatgtttggtgcaattttgctattttgcattctgcttttgtcaccacaatacagtgtcccagggtcccatattactgaacattctttcatagcagcacttcgatggctacatggtgtatctttggcctgccttaccataatttgcttcagttttcctttgtgttaggggacatttgcaagactttgtatatcagccagcatctagtcaggatacagaaaccatactgttatttaaacagggtatattccaatgtaaatgattgacaactagtagaagctggttagttgtgagtaaaagagaactcttatgggtccagaagaagctgttgcagaaaagaagctatggcctccagtttgaggaagagtgggcagttgaggaactaaagaccaagagcgggcattgctcgtcccccagagttcttcagagagggcatggccaccacagggacatcaccacccacgggtgatgcagaaacttgtcagaggaaagcagctggccagctggctgtgcagcactatagacgtgtctctgttgccagaagcttgggtaggcagaactgctttgaagcagtccctggtagggagagcagagcccgggtgcaggaggcctgaggccttccccatggaatagtaatggtggatcccaaagggaatgtcctttccccaggcagaatcactccagtgccctctattggtgaagtgtcacattgccgcagctggcaacctgtcagaaagcagggccaagaatggttttgagttgagagacaataaatgaataactggaatatttgggcttgcttttagctttttttttttctttaaaccgttttgcagtaaacatctttcataaaatgttgattgcatctctgatatgttggtaggataaattcatagaatttgaacatttcaaaggccttagtcatatgttacaaaaccatcctattgactctcctagttgttgtatatgggagcaaaggcatatagccttgttatagaacttgttactccttaaccttttgaatcttggccttgtttgctgggttgttaactctgaggctgggagatgctcagagccagcgatgtcaaggttggagcctgcagtctgatgtaataagggccaagctctgccgtggagggagggagtagtgtgttgctgaagtcctccctcacctcgctcagtcttctgaacgcattcccttcccatctcattcactgcttcaacaaattcattccctaaaacatccccttcatcacatcagtaatcttgctcaaaagctgtaaatgtttcctctttgtttatggcaatgcaaatgaaagaggaggggagagaactgacctatggccctgggtccgttgcctccattcagttgttgagggtctgaagcaaattgacatgcccagggtcacgtgggaagtaagttggtcagggccaaccagggcttccttcctcccagtcctctgcttctcccagataccagaccattgttgctccatctccctaactcctcattgtcctcccagcacagcacctgtcccacgagaggttttattaatgtgtatcatactcccctagtgctcacactatctctgaactcttatgggtccagaagaagcagttgcagaaaagaagctgtggcctccagtttgaggaagagtgggcagttgaggaactaaagaccaagagcaggcattgcttgtcccccagggttcttcaaagagggcatggccaccacagggacatcacaacctacggatggtgcataaacttgtcagaggaaagcagctggccgctggctgtgcagcactatagacgtgtctctgttgccagaagcttggataggcagagctgctttgaagcagtccctggtagggagagcagaggccggacgcaggaggcttgaggccttccccatggaatcataatggtggatcccaaagggaatgcccttgctggggctgccccactgtctgaaatgcaaagatggcccccctcagctgctgtgcttaaggggactgcctacacctaacttcaaggccaagtccaagattcacatctacataattacattccattactgtttaacagattagagtcagtaattcttatcctggggtattagagatgtggacatgaactgggttctaccctgagcttttagtccccagcctagacaccaggcaaaaagtaggtatgtgctggctcctatcatgtgaaattggctaaggaagcaagcaacttggtgtctttggacagggggctgctttttttaaattaaatttaatcttttttttgagcagtcgtggacatctggttgtgcatgtccctttaaggcgagtttgtcgtctccagaaaagcatgttgttctttctctctatcttccacaagtccttgattaaaacactgaaggagacagacaggctccttctgtcctttccctcaggcttgccatgtcctggcagattccctgggctcctgggaactgtctacccatctctgtctgctccttttgacccagatcttattacagatacagagagagcaaaccatttattgcagaacaggcccttcaccttcatgttctgtgtttatagaccacaaataggtagttaatagatatctcttaatacttgttctttctttttttggctttgggaatttggtacaggatatctgggtcctgtggaaagtgaaatgatgcgagaaaaagacaacagctgaaaatggaatcctcacttaggagcatgaaaaaagtagaaaagaagtcaaaccacaaattcttcaaattaatgggtgggaatgaagtgctgccactctaatggggtggcggggctgctgtttctgatggtgagcagcccctgcaaggctagagcctcagttatggggaatgggcatttacagcagctgaccactttttcttccttatccttcttcctcattcccacctgccttttttcccctgtttctttttttggggggtggtgtctggattttattttagggtatttctaatatgcttccttaacggtcgatccgtagtcctgtctggagacattgctgtgtaacttagcaaccagcgtatcatatattgccctcagttgtttcattagcctgaagatgtgaacatcaaaaaaatggacacacagttggacaaaagcgatcaggcttgcatgcaaaaacagtttctgtgatgattaagaaatggacctgaagaacagcattattttacagtaacatatccaaagtaagggtgtcctcatatctggagaaagagacagacacagacaaggatggagagggagtgagaagagacagagccagggaagatgctggagctgcctgccctccacagggcctgaacgcagaggatcggaagccttcctccctgtggacctcctgttgtccttgctaaaaaacaggaaggagaatagaattgggatttttgagtaggcataattcttcatttatctgactaagtagaaagttggcataacgagaaaaacagatttcagagggaaacatatgacaatgacatttttctgtgccatcttattacccaatccacatggaggctgaatcgatgagctagtaaagacacaaagacatcctatcgagatgcctgtgaatggcaggggctggtacagtctggaactgctggctatgagtaaatatgacagcagggctttggctggctttcactgggccacttgtcattctcctcgtacattgtgtgcagtcaggacatttccctgcagaaatgttctttctgctgcttttctcatcatttttgagaagctggcatgagttttgtttgcttcagactttatttattaccttgaaattcagaatatttattccaaatgtcatgtgtagtcttagaaaagtttagactgtgacgattctgaacttcattttgcatcagaattacttgggatcatagtaaaaatgcagcaaaccaggcccctgattcacgagctatggagggaaatccccagaaatctgcattctaacactcacccatggtgattctaaagcagatgggctgaagatcataggataaatgaaagattaaagactcattttccagagagggcatgtggcaatttcttggcactgtgagttgatagatacattctttgctttcatggaatccctttccctgtttgtggggggtattgcctcattgtttttttcttcctcacacactttatttcccataagttattggggtaacaggtggtatttggttacatgagtaagttctttagtggtgatttgtgagattttggtgtacacatcacccaagcagtatacactgcaccatatttgtagtttttttatccctcacccccctcccgctcttccccccaagtccccacagtccattgtatcattcttatgcctttgtgtcctcatagcttagctgccacatatcagtgaggacatacgatgtttgtttttgcattcctaatttacttagaataatagtctccaatctcatctggtcgctgaaaatgctgttaactcactcctttttatggctgtgtagtattccatcatatgtgtgtgtatatatatatatttatatatatatttttatatataccacagtttctttatccattcgttgatgatgggcatttgggttggttccatgattttgctattgtgaattgtgctgctataaacgtgcatgtgcaagtatctttttttgaataatgacttcttttcctctggctagatacccagtagtgggactgctggatcaaatggtagttctacttctggttctttaaggaatctccacactgtttccacagtggctatagtagtttacgttcccaccggaagtgtagaagtgttctctgtttaccacatccatgccaatatctactgttttttttatttttttgattatggccattcttgcaagagtaaagtgatatcgcattgtggttttgatttgcatttccctgatcattagggatgttgagcattttttcatatgtttcttggccatttttatatccttttttgagaattgtctattcatgttcttagcccactttttgatgggattttttttttcttactgatttgtttgaattcgttgtagattctggatatcaatcctttttcatatgtatagattgtgaagattttctcccactctgtgggttgtctgtttactctgctgactgttccctttgctgtgcaaaagctctttagtttaattaggtcccagctatttatctttgttttcattgcatttgcttttggcttcttggtcatgaaatccttgtctaagccaatgtctagaagggttcttccgatgttatctgctagaatttttatagtttcaggtcttacgtttaagtccttaatccatcttgagttgatttttgtaaaaggtgagaaatgaggatccagtttcattctccgacatatggcttgccaattatcctagcatcatttgttgaaaagggtgttctctccccactttatgtttttgtttgctttgtcgaagatcagttggttataagtatttgggtttatttctgtgttctctattctgttccattggtctatgtgcctgtttttataccactaccatgctgttttggtgactatggccttatagtatagtttgaaatcaggtagtgtgatgcctccaggattatggctgcctctgttgagtcatgcaggttgtcagggaagtgggggaaggccggccgtgacaggcttcacccagctcccatgcaaactgaagggccagtctcactcccaccatacaaagttcggctacagatttccttctccctgtggagttataccccctgctccactggccaccctcccgttggatccctgtggtgccaggtggtaatggcctgctaggggacgcagcgagctcccaggacctttctgctgcttcctctaccctgtatttctctcccgtctctaaattggctcagctccaggtaaggtcggaaacttctcccgcaaagagaccttcagcttctttagtgggggtgtgttttcggagaagagggtctccctttcctacttccacagttggggcactcacagtatttggggtgtctcccgggtattgcaggagccagtctgcttccttcagagggtctgtgggtcctctcgggattactggtttgtccttgcagtctatctggagctaaaatccacaaagcgagcttccgcacgctactctgtccggagctgcaatctagtcctgcctcccgtccgccatgatgatccccttcccatttgccattttaaagccttagagccacgtctccccattgagttgaaatgccctggtgaggtagtagccctcacacactttttgtttgtttgtttgtttgtttgtttttgaaacggagtttcgctgttgttgcccaggctggagtgcagtggcgtgatctcggctcactgcaacctccaccttccagtttcaagcgattctcctgcctcagcctcctgagtagctgggattacaggcgcccgccaccacgcctggctaatttttttgtgtttttattagagaccgggtttcaccatgttgcccaggctgctctcgaactcctgacctcgtgacccaccggcctgggcctcccaaagtgctcggattacaggcgtgagccaccgcgcctggcccctcacacactctcatacgtcatttgatgcagtttcttctctggcctgagaaaagtgaccttgcctcagttaaatgctggttggattgaccctgataagacagagatgaccttgttgctcaccttgttgagggagaatatcagcatgaaacactttgtcagtgtctcaggcagaggtgaattcatcaggactccactagagatgcagtaccagtaggagatgtataggaactgactgcaaggaattacctcatgggattatgggagctggttaggaaaaccctaaatccacagggtgggctggaactctgagacacagactgaatctgctatctactgtccacaggtagaatttgttccttcaaggtaccctcggctctgttttattgttagtgttttgttttgttttgaagagacagggtcttgctctgttgcctaggctggagtgcagtagtgggatcatagatcactgcagccttaactttctgggctcaagcaatcatcccacctcagcctcccaagtagctgggaccacaggcataagccactatgcccagctaaacaactctgtttttaaggcctttcaatttattgaaacaagcccattgagattatctaggataatctctcttacttaaagtcaagtgattatagactttcatcacatatacaaaataccttacagcaacatctagattagtattcgcataactggaaactgtagtctagtgaagttaacacatcaaaaaggccacccagtaccacaccacccccagccccgccaaaaaaaaaaaaaaaaaaaaaaaaggaaaagctatcacagaaagtaaagtcagaatttattgagaattggaagtttggtttagttgggtctttcaaagcatgcatgggtcatgatacaacagtttggattggtggaaactgcaggctttgaggcaagggattcaaagaaccttagggtacaaacagttgatgtttttcatttgagtttctgggtctttcagaaagttcctgtaatgagcagtcatgccatctgcctaggcaggagacttctggaagaataaagttatgccagtaaagacagaggaagcatacaaagtgctgttattgcagacattggaaggtgtgcgttctcagtaaccagctgagtgtgggggtgagggagatggtttctattctcagcccagaggctctggattcctttctcatgaagcgggccacatgacccttgttcccaaagcctgagccttgcatttctccttaggagaatatctgtggacagatatgccggccatattgcccagctggctcaagagagagatgacatgtttgctaacagcaaatcagagctggagtgccaccccttactcctgctcttccctcttcttaaatggtggaagatcagtctacctttcaagagtcccgtcttccttttcttcctgcatctccagctctaagcgaccacataggacttttctctgttccatgaagatgtcttgtcctttcatgcctcagagctttgagatgtgctgtttcctcttctcccctgggaaatcctgcctatgcccagagggccatcttgaatgtcatctcctctaaaagcctgtgctgcacaccctgttcttcccctctctctgcatcacacctatgtgctgatgcagtgctggtcacccccaggtctctgccatggtacagatgcagttattatatgtcagtttctgtcactgaccaattcccagcggacaggaattagtcctgtttaactttgtatctgccttggtgcctcatctgtggctggcatacagtagtttagctatttattcaacagatagtttttgagtgccggcatgtgccaggtcataggtgtccactcttctggatgggagtgatatagacataataaactatctgctctcatggaggtgacatcctaggggtgaggaagacagccaatgaacaaaaaagatgcataagtaaaagcacatagacagcacttattgatgctccgagggctgctccctctgaaacagactgaggactgaataggataaaaaaagtgggtgagagattccctgcctccaatacaaagcatgcttgtgagacagaattcctccttagacatgccggtcaacttacagaagaggtatgcatttgctaatatttgttatcctgctgggtagacgtttctgtccttggtgtaacatagattgtactattatttttatttattatttatgtatagggtctagctaaaaacaaataagggtctagcagtgtgctttttatgtgttttattttattttattttttgagacggagtctcgctccgtcacccaggctggagtgcagtggcgtaatctcggctcactgcaagctccgcctcccgggttcacgccattctcctgcctcagcctcccgagtagctgggactacaggcgcctgccaccacgcccggctaatttttttttgtatttttggtagagatggggtttcaccgtgttagccaggatggtctcgatctcctgacctcgtgatctgcctgcctgggcctcccaaagtgctgggattacaggcttgagccaccgtgcccggcctacgtgttatttttgtgcttaataataaacagcgaactctctctctctttctctctcttcctatctcatttctttttagcatttgcaatttgccaggctgttttaaggactttaaatggattatctcacttggtcctcagaacaacctaggaaataggcagtatcctcattttccatgggaggaagccggggacatgagaaagctgggaacatgaggacagccatgccacttgcaccaggttttcccgctcggaagtgaaatgtgtgtccagtctgggtggccccatcacttttaagctatgcactatgcctcctgtgtgggatttatgaaatcagaacaatgacaagcctctttctttcttaatgaagtttacatcccaagttaggcctttcagagccaaaggtgtcatcagcatatggtgaaaaagctgtaatccagttgactttctggatagaatatagtctcagaaacagtggtctaccattgcctttgtttctgagtttgctctgcctttctgtcaggaccttaacatttttaatgcatattttagtagttctacatatctccttttcatttaaagtacaagacactgatttaaaagcatgggggaaggaagggagagaagataaatgtaattgttgattgagaaggcacaggcagaaggtgctgttgtctctgggacagcagtaattgctctcattcttgagccagttggagtctagatgcagtgcctgcgtccgtttcctcttgttcttattcacctctaacagtgcattgttcttcccacttttgggaagagagtttaggtctgaggaattaagtagcttttactgagtccactcagctggtgagaagcagagcaggaattgagcccagctttatcagagaatttaatcatgctttgctttgaaacaaacaatcatcaagaccctttcttgaaagcaatcttgcttgggttccaaaaaagaaggagtgaaccttgaaggagtgcctgagggagcctagaggccaatgcggaacttttccagccctcctcccacccagcacccagtacatcaccttgggtgtggcagggaagccctgggactccgaggagcattccttagcagttaggaatccagtcttgattatttgctgtcatgtatgttgagcgactgatgaactcttcctctgagggtaaatgcaaggcctggctcttacctttgtcaggcagacagagcacagcatttgttgtcagactacctgggtttgagtcctctcatcctcctccatgatgttgggcaaataacttatcctctcagcagctttgctttcttatctttaacgtgggcatagagttataatgttggttacataagcatgagaaacaaaaactccgagcccagttcctttcaataaatgttagtttattgcttttgttaggaatgtctcattgcagctccaaatttccatgattattagaaagattatttctgggccaggtgtggtggcttatgcctataatcccaacactttgggaggctgagatgggcagatcacaaggtcaggagtttgagaccagcctggccaatatggtgaaacctcgcctctactaaaaatacaaaaattagccgggcttggtgacaggctcctgtaatcccagctactcggaaggctgaggcaggagaatcgcttgaacctgggaggtggaggttacagtgagcccagatcgtgccactgcactccagcctaggtgacagaacgagactccttctgggaaaaaaaaaattgtttctaaaccctcctggccgcttcatacccttggggccttcttcccttcctgtttggaaaatttgggaagaataaactagacctctttcctcttgggaagggacctgccttaagtcttacatgaacaggtgtgcctggcccaagggttcagtcagcacgtctgctggctcactctgagcgttgttctccataatcactaatataaaggatttttagttctccatcttattttctcaagttgtttagagcttgagcaaagaaagggtatgttatgtatttggcttccttagaactctgttgttagtatttgccatcttcctttcatttctcacagagtcatagaattttagagttgaaaagagattttaaaaatgacttgaattcatttccccagctcctatctcagcctgcctgccaagaggcattcagtaccatgtttgcatgcttctagtaacaatgagctagctctctccggaggtgacccagtgcatcaggggatgctctacactgggctgaattgcacacatagggcctggatctggtggtgttgggttttcgggcctgcctgcacttggtgtgaaatgttcagatctgcttttctttgggaagaaatactggcctgaaggctgcccctttttgggtggttcttttagaaaattcattgtccaaaaaatcgtcagaattggctgaggaagcaagcaatcttatatgtctttggcatttcatcaagaaatttcccaccacctcagtgtgtctgctgagtcctgagcaaactccagcttgtggctcgtcttaaattatgcagggtagtgatcctgaaggcagatttattaacccccaacttcagcataccaggtagggcatgcgaccacggtgagtcctggaaggcctcctcctggaaattgggtgtggtgtgtactctgctggaagaaaataaaaccaccaatgaaattctatcttcaatgtcaaagatgctgtattagtctgttcttacactgctataaacaactacctgagactaggtaatttataaagaaaagagggtttaattgactcacagttccgcatggctggagaggcctcaaaaaacttaacaatcatggcagaaaggtaagcaggcatgtcttacatggcagcaggtgagagagggtgtgaaagaagcaaaggggaaagagccccttataaaaccatcagatctcgtgagaactcactcactctcacgagaatggcatgggggaaactgcccctattatccagttgccttccccaaggtccctctgttaacacatggggattacaattgaagatgagagtttggtggggacacaaagccaaaccacaccagatgctaagtgatagcttcataacacttacttcaaatatacttgccaaatggaggcagactgattggagagctgcttatttatgctgtttgtgcttaacttcaaggcaacatgcaaaaggaatcagcaaatgttaagaaaccaaactccttaataacccttttaaagaaacagctttactgagacagacgtcacaatgattcaccttttaaaggtgtccaatttgggggtatttagtgcattcacaatgttgtgcagccatcaccaatctagttccaaaacatttacatcaccccaaaagaaaacactggacccatggagcagtcattcccattccctccctcccccagccttaggcaaccatttatcctaatggctgattctatttatttgcctatcctggacatttcatgcaaatgcagtcatataacatgaagcctttgtgtctggcatctttcacttagtgtaatgttttcaaggttcatccatgttatagcatgtattggtacttaattcctttttttttttttttcctttaagacggagtttcactcttgttgcctaggctggaatgtagtggtgctatctcagctcactgcaacctctgcctcctggattcaagcaattctcctgtctcagccttctgagtagctgggattacaggcgcctgccactatgcctggctaattttttctttttgtatttttattagagacggggtttcgccatactggccaagctggtctcaaactcctgacctcaggtgatccacctgcttcggccttccaaagtgctgggattacaggtgtgagccaccacgcctggcccttcattccttttttatgacttactaattttctgtggaacggatagaccacattttgcttatccatttatcaagtaatggacatatgtattgtttctacgttttggctattatagataatgtttctgtgaacattagtgcacaaatttttgtgtggacatatgctttcacttcccttgagtaaatatgtaggagtgcaatcgtaggagtcaggaattgtagaaatgtaggagtcaggtcatatgcccttaataaccttttaaaattactttttttgtttgctatacttgggacccatattccttttctttgggtttgtattcacttcctttgtactgaatattgtcagatagaaagttaacagcctttatagaaataattaaaaattattcaagtgagaataaactgaatgcctgttatatctgctagattatatttgcctttgttctcttctttaccaagcttctacttgaaaatttacaaagattttttcttcttttccagaaccgcaatgagataaaaaatggcactatccttcgattaaccacatctccagtaagttgatcttagcttctgacttccagcaaactctttgctctgcgtttctgctatatgtgattgtgggatattaatttttgaggttgactttagtgcaaagcaaaaggcttccagaatgtcctgacatgcagattctggattagcaggaatgcccctccgtagatttcccactgcagaggaggaagaccttattccaggcgaagggcaagcttgtctaacctgcggcccaggatagctttgaattcacaaattcgtaaactttctcaaaacattatgagttgttctgtattttatttagttcatcagctatcgttagcgtattttatgtgtggcccaagacattcttcttcttcctgtggcccagggaagccaaaagattggacacttctgctttaagatttgagtttggaggtcatcttaacaacttctgtgttacagctgggatcactcacctgtaccaattggttttacccacctactcacacatccacctaatgccatctgagcaaattcagacaacaaacaaagcaaacaaaaccaaagtcagttactttcctttaaagtcggttactttcctttaaagtcagtgtggctgggcgcggtggctcatgcctgtaatcccagcactttgggaggccgaggcaggtggatcaggaggtcaggagatcaagaccatcttggctaacacagtgaaaccctgtctctactaaaaatacaaaaaattagccgggcgtggtggtggacgcctgtagtcccagctactcgggaggctaaggcaggagaatggcgtgaaacctaataggtggagcttgcagtgagcagaggtagtgccactgcactccagcctgggtgagagagtgagactccatctcaaaaaaaaaaagaaaaaaaagaaaaagtcagtgtgtgtgtgtgtgtgtgtgtctgtgtgtgtgtgtgtgtgtggagagagagagagagtttaagtattttgtagctttaatgggttattatgacaattcataaaaataatttagaaatattgaccacttcactgatccattgacagctgattctacataagaactttagagtcttctgaattaaagctgctaaacaagacgctacagtatatttagactattgtagctgatgatgtctctcttcttggtctttcctacttgcttggagatactttaggtagtaacattagcatatttaactatattattttacagtgcatttcattgctttcctaaaaaattatctgccccaaatacaccaagtgttactattttcactctgcatatgtgatgaaaactgtgtctaactatcattttcagtttccactgaagccatgtggtagactaaaaataaatttaaaaattgggaaaagcatctggctaaaattaagctgtgggtactgtaactaccataaatccttattgttgaaaattacattagtgtggcttagaaactcctaaacattttgcccaataacatcctgaacctaaaaacagtgatgagctcaatggagtgagttgctacagttggctgaactgtctttgatgcctgctttgctacttaatggagattataatctactcatttttcagtggctacatgatgagctgaggcgttttcgtctgactttgcattggtcttcttactcaagtcagcatgaatgaatgttaatttgacctttacaccattgttttatgtgttttttgtagtttctgattatcctgctaaaagtcatcatctgcttgctggacagaaaaagtagaccttgccttttatttcattttagagtctaaaagacagctttttaatcaaagccttctctaagccaaagaaggagttagtttcatttttttactgctgtggatttatgaacaaaaattccgcaatctaagtcactccttgagagaaggcttagatgttaggcagagtgaagtttttcagcatcccaaaagaaacttagcgtgacttgtcatcaggaagaatggaatttgtgttcttgagataatgatcctcacattcccagctcagtgaatggaaagatgtgaaagccagtgtaagaggcactattaaaagatgggagcagccgggtgcagtggctcacgcctgtaatcccagcactttgggaggccgaggcaggcggatcacgaggtcaggagatcaagaccatcctggctaacacggtgtaaaccccgtctctactaaaaatacaaaaaaaattagccaggcgtggtggcaggcgcctgtagtcccagctactcgggaggctgacgcaggagaatggcgtgaacccaggaggtggagcttacagtgagcagagatgacgccactgcactccagcctgggcaacagagtgagactatgtctctgtctcaaaaaaaaaaaaaaaaaaaaaaagataggagcccagctacaaaagactggcttacattttccaaaaagcagtgatccccaaacctggatcagctgtggaagtttgaaaatgctgatgtctggggccttaatagagaggctggattacaatatttgggaataggccccaggaatctgcattttaagcaatcaccttgtggtttggctgtagccacagggtctagaattgagaagttactctataagccagaaatttgggatctgtgaactttaaataggttattttttatagttttgcatgtagctgaaaaatatacttgcatatgcttgttcatttttacatacacaataaaaatatgttaaaaacaacaacacctattagagtaccataaagaagccagcagatggtgttatactagctttcgaagttccttcgtctgcctcagctgaactctccctgaagccaaataaggacatctcaacatccacatgggcacacacacgcctgcgcgtgcacacacacacactgctgtttttatgtaacgtgtagctatgctgagttttacctccactctgtcaaaggtggtctttttgttgattgatgaatttgttttctgtctccctttatcacagaacagtcccttctggattgatcctagagaaatggtcactaatactagaagatctaaacaaacaacctgcactgtttaattcatttgtaataggccttgtacatggctgctgcttctccactgcatggtacatctttagacagtctctctagtggccgtgttaaacaagcgtatctttctagtgtggtatctttatctatctcctgctaccataaaaaatataggctgggtgtggtggctcacacctgtaaacccagcactttgggaggccaaggcgggtagatcacgaggtcaggagttcaagaccagcctggccaagatgacaaaaaccccatcactactaaaaatacaaaaattagccgagaatggtggtgggcacctgtaatcccagcttctcggcaggctgaggcagagaattgcttgaacccaggaggcggaggttacagtgagctgagatcatgccactgcactccagcctgggcgacagagcgagagcctgtctcacaaaaaaatatagccaggaacacacccagagaatgtgtgcaaatgtgtgtgacctttggagcagtcaggatttggggagcttctatatgcagagctgagtagtgtcttgtagtgtctcctacctgccatgatcataatagctgtgggcatagagtctgaggtcctctgttgcatgcagcatattttaaaatcagctttggctattgttcgtatcagaaacagcttggcttgccagaccattgttacttttctgaaatttttgttttaagaagtgcttatggtgactatatttgtagtcttgaagtagagagaaacttctaagtagaacacaaaatgcagaaaccataaagaaaaagatcaataaatttgactaccaaaaaattaaaacaaccccacaaaaactttgtgtttggaaagaattccagaaacaaagtcaaaaacaacattggaaaaaataattgacagctgcataatggaggtccggttcattcatttgcaagattttttatgagtggatcaagaaaccgtcccaaaagacaggctgccaaaagctatgaacaagggaaaaataaacaaaataatgtctgtgcatgtatgtgtgtatgtatctatctgagaagaagttcaatctctcttagagatgaaaatctacagtcctagataatctaagtgtgaggaaaagatgctgtggggtcaggattttgaaaatttgaagtagaatctatttgtatgccctcttcgggggcaatctagtggtattcacctaagtttaaaatacatatacctttgtcttaacagtactgctgctgggaatttatataataaatagactcacaaaagcactgcaggatgaacacacacacacacgcgcgcgcgcgcccaagcatggctatatgcatcattgtttttagtgatcaaaaactaggaacctgttatgtatctatcagttggactaggtaagtgcagtaggtaatttttatgttgtagaatactgtgcagttgttagtaagaatgtgatacgtgctgccgaggaggtatccctaaagtatgccattaacacaaaagcaggttgcagaacatcctgtatagagggatgcctgttatgtatgtggaagggaagtgtatgtatattcagataaaaggataaaatgtttctcaagggatacccacaagaaactgttacctttgggctaactttatttttttatttggtaacttccagtagtactcgtgtgtgtgtgtgtgtgtgtgtgtgtgtgtgtgtgtgtgtgtgtgtgtgtatatatacatattttttttttttttttagatggagtcttgctctgtcgcccaggctggagtatagtggcacaatttcagctcactaaaatctccgcctcctgggttcaagtgattctcctgcctcagcctcccgagtagctgggactacaggcgtacgccatcatgcccggctaatttttgtatttttagtagagatggggtttccccatgttggcaaggctggtctcgaattcttgacctcaagttatctgctcgcctcaacctcccaaagtgctgggattacaggtgtgagccaccatgcctggctgtactcatgtatttctacctatctcatgtgctggtattatttttaattaaagaaatacacaaatatatattacaaagccattatagtacaaaagaggtgaatcataatgccctatgctaaaaacatgtcaagattgcaaactatgagatttttttgtgaaccctattataagcgaactgaattattgaccattatgccttcttttggcctgtgtggatgtattatagaaagcagaactgctcatcaagtccctactgttgctttgtcagctgtaagcataatccttgctttctactctttctggtttagggagccggtatcagcattatttaggtcagagggcctgtcatcatgatttttgggtcttattccctctggcaataagaaaaatagtattatctcagtcattgtgtggattcaggttatcggagattcttaacaataagcccattaatttttttttttaattccatttttcaattcaggttttcaatttttctctcctggtttgagaaactaataaagggttgtaacatgccttaaattctatttattggcatcactctcagcggcctagcttatgggagaagaagccagtggaggctggcaggcagaggcgacacaggatccccaggctgctgcccaaggacagattgcaggggcggccagggcaccgggtcagagtttcttgcaggttcaggagatgcagggggcttgggctacctgccttgtagggaattggagagttggaaggagtgtcgtggagggcaagccccagaacttcagcatgtggtgctctttgaggaaggatgtcctgttcctcccggtgctctggcaaaattaactgcgtgctgttaactaggaagcctggacagatgcaggtgtgccagccacccccatggaaatggcatttaaagctgtgggctggaagaggtcaccatggggaaagtagaggagagggctcagcacagacccctggggacactcttaaggtttagaggaggagcctagcaagaagccaggtgagcaaagtgtttcaaggaggagggagtagtacttaggtgtgttggaggctgtccaggtaataaagatgatgcgatgagggtggtccctgggctgccacctggaggtattaatagcatggtggagacactctccatgcagggctggacagggacgcctcatgagagcggggagaataggaggtagaacggaggcaacactttcgagctactctctcttccaaaacttttgctgaaaatgcaagcagagaaatgaggaagtagctgtagggaaactgggtcaatggatgtttttacctttctgtttattttttttaaagatgggagatattagagatttttgcagctggaaatgttctactacagagagagaattgatgatacagaagaaagggagataaatttgaagtaaaatacttgagaaggccaggggagaggagatccagagctgaggggaagagctgacttctgataggaaacagggtccccgccacacagcatctatcaggaggaagcagagcttgagggtagagatgccagcagctggtgctgttagaagtaggaagatgaaggaactcctggctgattgctttgatttcctcaattaaatgatcaccagtggaggggaggcagcagaaaggcatagagggggtttaaggagagtagaaaaggtatggaggagtcattctgaagggacacagcaaacattccaggaaaatattggattgctgggcaacattgagcgtacatttgaagatatctattaaactgttgaaactaaggatgtttttagactactttttaattggcatcatggatccagagttatgctagaagtttcttggggatgattttaacttgtatcttcaagagagagaaatgttaaatgcttgacacacacacactaccagtaccctttcctgtgcccacggctaatcctttatgagctgtttcctcccttggagtctggagtctgggtccagaaccctttcctatctgggacatgaggtagccacatcaagctgtttcaatggcccaaagtaaaacttttttctatccttagagcaataccagaaaatataacttgctgtctgatacagagacctacatgactattagattcttttcatgtgtgctggttgcttgaaaaatcagaaccaaggctatcttatttttttaataatgttgactctttcctcccaaatataaaaatggtgcaaattcattatggaaaatgcaaaaaataaggcttcctgcaaagaaaattgtttagaatattacaattcataaataaccacaggtcacatctacttgccttctttgaccatttgtatgcaaatgtgtgaatacatatgtgtgcatacatgaatgtatatatattcatttataggttcatatatatattcatttatgcattcatatatatatgtgtattcatttgtacattcatttagtgaaatgtgttttgaactcatggtaaatgccagacacacttctgtgtgctgggtgacattacattctggcagatacacacactccactgcgcatattcccacctcccataaacaataaaatatgtttgcgtcttggctgtttctcttaatattgcctcgtgaggatgttctcacactattttacattctctaaaagttccatatgtagttctatatgatatttcatcctatgactatgtcatgactatttcaccattgtcctattggtaaacacgatggttgctcaatgtttggctatgaatgctgttttaagggctccaaatgtaccacacatccatctccgatatttacatgcatccattcagggaagcacatcaccaccagggactccttcagctctgcatgctcatgaacaccctaggctaccttgtctactgcttccacatcctcacttccctccacaccccctggcctgcagaccccagacacatcagtcctctcctttctctccctccagacaggccaggcttgttccacctgaatcagggctttggcactaaccattgatgctgcccagaatattccactccccaatgtggtggggtccttcttgtcagtcagatctctccttgaatgtcacttccttaggttgcttgtccctgaaaaccactccatctaaagaagccatcagtcactctctaacacaaaccctccactttaggttttgctatgaaacatcaatatttgattttttattgctaattttaaaagttgtccacctgccacaccaaggtgggtgagccccaggaggttgagaaccgtagctgtcttatttgttgctgtatcccaaatgtgcggaacaaatgtcaagcttttcagaagtatttgttgaatcagtgaatgaggatgctgaggattttgaaggaacattcctttccactggataactggaaagacttgtctgagaatacatatatttatatatataaaatatataaaattatataaagagtgatctgcaataactgatatctgagaacaaaatttccttacaaaactccaatcttttcagaataaaaactttgattcccactttttttatataataaatgttgtatttccagattatttagaaattagagaagataaaaagaaggtatatccctgcctgttctggatccaattggaaaaatattgcattaaaagggtcccaccagtttgacataatattttgattggaggtcacttctgggactcacctctgtggagcaccttttcctggcggactccatgatgagggttactgcccagctgagatgcactctgtcacactgtgggtggaagggaaccttaaacatgatctcatcacagttccttggtgtacctactgatggggaaaatgaggccaagagaggtgaagagagaagttcactgcagccctggaggtagccaatggcagagatgtaagtagccctgccttggactcctgggtcatggaggtttccatcatggtcccctcgccacctggcttgccacagtcctcccctcctctttagtgatgtgtctcctccagttgttcacctatgtcctaggatgaagagggaaatttaccctaaagcaaacactgtgggaactgcactttttaaagaaaagttgtctccttagatacgggtaccaagggaaggagcaaggcctgtggggatagttaagaacagcctcatgccaacagaacacatcattctcaggcgctggggtgagtgaaggagaggggtgaatagttctgtaggaactttccaggccattgagtctatgagcttttttgtagtttgacaatttggagaaggctttactgctattactgggagtgactccttggctaagatcccagcaagttaggatattgctttgctattcttacatgtgaccatcttggtaaaatattttcaatttctatagcagcaacccatgagcagttgtgggatttgggaggactccacagtcttgattcctctgcttgggacatttgtccttttcaggtttctgttgtttctctcctcacttcttttattttaaaatttatttatttacttttaagtaggtaagtatgaaggcatgtaaatgaattaggaagaatagatataataaagtatatattaataagagtaggtataataaattccatctacttagcttccacattattgactttttctttgttttcttagcaaaggttcttccttaaaggtgcacagcttttaaaagggcaagcacattttctttaggtactgtaaaccaggagggcctccttgtgttacagctggggaagatcaggtggtagttgaaaaacacaatcagctgggcgtggtggctcacgcctgtaatcccagcactttgggaggccgaggcaggctgatcacctgaggtcaggaattcaagaccagcctggccaacatggtgaaaccctgtgtctactaaaaattgaaaaattagccaggcatggtgcaagaacttgtaattccagctacttgggacgctgagacaggagaatcgcttgaatctgggaggcggaggttgcagtgagtcgagattgtgccactgcactccagcctgggtgacagagcaagactccctaaaaaaaaaagaaagaaagaaaaacacaatcagagctgctcattctatcatcacggagagatgcagcatcctgagtgatttagagtggtggtcctcagcgtgtgattcccaggccagcagcagcaacacttaggggcttgttaaacacaaaacttttgggaccccaccccagacctttagaaccagaaactctaggggtggcccttggtctgtgtattaagaagtcatccaggtgattcttacacaggcaacaatttgagatccactgtttacaatgtgttttctggagtccagctgcccagtttctattttagcctcagcactgataagctgtgtgaccttgggcaagttacctaacttccctgaacttcaatttcctttgtcaaataaagcctatgataggacctacctgttgggactattgtggagattaaatgaattactttatgaggtatttagaatagtggcttataaaaagtgctaggaaacttggctattttttatattggtatcaactgcatcaaacactattagcattaataatgacaatgaaataatttttgggtactcattattgtcataacctatatagtaaatgcaaacatccttcttggagaaaaaatacacttttcaaggaatttgaaatgatttgcttgggttaactattaaatgttcatgtgaatgctgtatatccatttgaaaattttggaaagtactatatccctgaacaattttaagagataaataattctcacccagctctccactctcccttttaatatttgagtgatgtgtgggttatctgtagatcagtgaatagataagtagggagggctctcgttttcctccctgctcttttccttcttttctaatttctgatgcaacgtgtctgtttttggttttaattaaatgggagacctgccacatctgtgaccaagtgatcggggcatgggttctatccctgtctcgggtcctaaagaattgcatcagttcccctgttgaatccttttctcttcttgagggctgcttccaggtgacagtggagggagaactgggcagggagggagggctctgtggctgtggacctgctggggtggagtctttctgctcttaggacctgcatggattccctcccctattccaggcagagtctgtggccagcactggttttgccttcgatacctaggtggttctcctgcctccactctgcaaccttaaccctgtgatagttcacagggggttcctgagagagttgtaaccagttgtctgttgaggagagatacctcattaatggggtcgacaccctatcttctccctctctaaaatataacacggtttcaaaagagaaagcaagtacccgagaaggagaatatgatgatagcagagtgcttcaaccacagtgattttgagttaacttggttatctgtattaagcaaaaacacaggcagaacattttattcctttgtttttcttactgcctgcctcaagtgaaaggtagatatgaaaaccttgacttgatgaataaaacatctggactacaaattattacccagaagttcagcttctctaatatatttcgattcctctctgtcctgcatgtagaagccaagtgcaaatgccttaaaagtaattctaggcatagctgttaatttggtttcctaattatttagttttacattcacacaagtagccaatgcatgtgaaacaacatgttgttgaaaattgaaatttacaagcatcgttgtggagtgctggaagatttgcagtaacctagaaagatcatttgggtggctaatgaagctcccgaacatgtgtaggcagttattactcagagtattgactgaacgggtgagcgtgctgtataaatttgtgtaattgcttaactaagcaaatagctttcagttgcttttacataataattttacttaaagggtaaatacttcccctttcctccctcctttctgccgcatcctgttcagtttctagggctttaatattcttgtactcttgctcttgcttttcctcgaaatggaaatccaactcctttgagaagaatgcaactgcttcctgttgtgacatgagcagacctcgctctgaaggtggagtgtttgggttggaagccttgaagcctgtcgttgagatgcccactctgtaatatgcagatagtcttgcgcttttggcttttgtatctctgttcctcattgaaacataaatctgttttgctgttgtggtttcgtttgtcaacactcttccctttgcttttgccccataaggctcagaacgcccagcagctccatgaacgaatccagtcctcgagtatggatgccaagctggaagccctgaaggacttggccagcctctcccgggatgtcacgtttgcccaggagtttataaacctggacggtatctctctcctcacgcagatggtggagagcggcactgagtaagcgtcttttttcctaacttccacagctgtcctgcgtgtctccgcgttttgaatattgttacatgccttacacttgcaaactctgttttaaagaccagagccttggttagactcaggaaaaaaatagtttttaagatagtggcgaggcagtgggtttgtaatttcaagagttctccatcctttgcccaccaccatctagtatctgagacaaaatagaaatccatcaagtgctagaaatttcaggtttatgtgggaaaatatcatgccattatctcagagggccttggcaacaatgaaagtataactcgacaaaacaatagtccctcatattcgttgcctatccctaagaaaaattttccctcccttaatccattaaaaaattagattacctaattatgtttcttttttcattgacagctcaagctagttcaagttatgtttcaaagtataaaaccaggtcaagatataatccctgaagtaattttaaaacttaacacttgaatgattaaatacttgtcattaattacttgaaattaaatgcagtcaacatgtattaactacctactcagtgcatgcaaaagagttgaacaaaggaaaattttttcttacgagcttgccttccagaaattgatggagactatcatatgggcagaattctattgcgtgtaattcctcctgagagccaggaatctagagggcggacccattatctctctctctctctcttatttttttttatttgagatggagtctttgttgcttaggctggagtgcagtggtgcaatcgctgttcactgcaacctccacctcctgggttcaagtgatcctcccacctcagcctcctgagtagctgggatttcaggcatgtgccaccacacccagctagttttttttttgttttttgtttttggtagatggagtctcactctgtcgccaggctggagtgtagtgggacgatctcggttcactgcaagctctgcctcctgggttcaagcaattctccttcctcaggctcccgagtagctaggactacaagcgtatgccaccacacctagctaatttttgtatttttagtagagatggggtttcaccatgtcagccaggatggtctcgatctcttgacctcgtgatctgcctgccttggcctcccaaggtgttgggattacaggcgtgagtcaccacgcccggcctaatttttgtatttttagtagagatggggttttaccacgttggccaggctggtctcgaactcctaacctcaaatgatctgcctgcctctgcctcccaaagtgctgggactacaggcgtgtgacaccacatgcagctaatttttgtgtttttagtagagacagggtttcaccatgtcagccagatggtctcgatctcttgacctcgtgatccgcccacctcggtctcccaagatattgggattacaggtgtgagccaccgtgtccagcctgatttttgtatttttagtagagatggggtttcaccacgttggccaggctggtcttgaactcctgacctgaagtggtccacctgcctctgcctcccagaagtgctgggacttgggactacaggcgtgtgacaccacacccagctaatttttgtatttttagtagagacagggtttcaccatgtcagccaggatggtctcgatctcttgacctcgtgatctgcccatttcggcttcccaaagtgttgggattacaggcgtgagccaccgtgcctggcctaatttttgtatttttagtagagacggggtttcaccacgttggccaggccagtctcaaactcctgacctcaagtgatccacctgcctctgcctcccaaagtgctgggattacaggcatgagccaccatgcctggctggaacccattaaatctcagcctcacagaggagatgagtgtgaactgtccttgagggagttggagttccatcatgagggaggaaggaatgtcccttcctgccggggagcttgctctctggtgtgactgtggagcgtcaggagccaggcggggccagctcttatgttggtggagagacaactcctttaaccactgaatgctgaatgcctgctaggatgagcaggaggctgcccctgccatgtggtcaggtgctattggcagagactagtagagcatacaatttaaagcatgtgaaattgctgaatcaattaattgcatatgaatatgctaagctaataaagtacagtgtcaggataggcatttattatgaaagagtaagtatcattgagaatggaggtttaaaactgggttgtttaaagggtacctagtaatacaaagaatgaattgataactctgcaagttagagatctttctgggcccctccccttctgtccccttcctctcctttccctccctcccttctcccttcccttcctcctcccttctcccttcccttcccttcccttcccttcccttcccttccccctgcccctctccctttcttccttcctttcttccttccctccttctcccttctctccctcccttccctttgtcctcctctcccctcccctcccttcccctctgccctcccctccccttttccctccccttttccctccctccctcctttccttccttccttccttccttcctttcttccttctttccttccttccttccttcctccttctcctccctccatcctccctccctcctacacttggcatcatctggcctctgcagttggtactagtgaaaacattttttttctcattcaaagacaagatattctttagagtttggagttggggatcttaactcgcagtcaagtagagaaaatccctagaactgaatgtgaagaacatcatgtcagagaagaccgacaaacaggcctgggtgatcgggaaagggtcaactgtagacaggtatcatttatttttttcaaggatgacgaaacctctgcttatgaaagtttgggcatacctcaacgtggagtggtacagggaaatgtaaaccctggatgttgtcagaatccagtgtggttactgtaagctggagctggagcttgaatcagcgagagggaagttgaaaaagtttagggatccaaggagcttgacaaaggaatggatacagagggtcctgtctgtgaggggagctccaggctggaagctggtctggaatgtgtcaggatcctattgcctgtttctggggagcagaggaggaggacgagttgttataaacaccttcactcatcactggattacttcatgtacctgccagacatggtagcctatactacataccccccacggcttctggtgagagagtggggcctgggggaggctgcctcggcaacactaacatgttaaataaaaatgtaaaaatgtttacccctgtttattgattaagctaagtcaaggacaatgcatcagagccagttgtaatgtcacctgctgatatgagttggttctgccacaagtacctaggtatccagggcttgagctctggcacattcagaatgatatttgcaaatacttctgaaattattagaattgcaattgtaattacggttactttaccgtggtaaagacagcaaagcaggggcgcatgtgatctgcattctgaacaggggcctgtggtggagcccctcacctccagaggccggcagttacagacttcgacaatgaaactgcctgctaggagcttttgttttcagtttctcattgctttactttgctagggctgccataacaaaataccacagactgagtggcataaacaacagaaactttatttttcctcagagttctggaagctgcaagtccatgatcaaggtgttggcagggttggtttctgctgaggttgctctggatagtggatggctgccttctctctctgtcctcatgtgcacatccctgttttttctttttgtcttcaaatctccttttcttataaggacaagagtcagattggattagggacacctaatggcttcattttaaattaatcatctcttgagagggcttatctccaaatactgtcccattctgaggtactggggtttagggcttaaacatgtgaattatgaggggccacacttcagtccgtaatgcttataaaagggacacaatcatttttgctttaaaagaaaaagagtaagaactgatgctatgtatgtgccttgtcaacattcttactttttctcagtgctgtggccttactttatgacacatctccacctgcagaacagtccaaaagattcactattcctcagacccaggatgggggacagcaggtctgaattctgtctccatgttgcacacgtattatacaatgtgagagaatgtcaatattgaatgtactttatgtgagctaaagcaactgaatgcctttcttaaaaaaaggagtatcacactcattaatatcttaactacagtcacgcactgcataagaacatttcgatcagtgatggaccacaaatataatggtggtctcatgagattatgatggagctgccctatacagttgtgccattttttatattttataccatggttttactatacctcttctctgtttagatacacaaatatttgctattgtgttaccattgcgtacactactcagcctagtaacatgctgtacaggtttgtagcctagaagcaataagctgtgccacatagcctaggtgtgttgtaggctataccatgtatgtttgtgtaagtacactctacgatgttcacacaacagaatcacctaatgatgcatttcttagcatgtatcgcattgttaagcaacacatgactgtatttataataatcagtaagccgtcccagtttgatacatacagccaggtttcagacagataaacagagcttaaggccaggtgttgggtgaattctcttttgcatttgtctcttatactttcccatcacactatgttcgtgggaaggaatgatgtctctcagggtcatctttggtgtcccccttcctgttttatgtaaattcaaagttacgctattttcggggatggaggaaggagggactggagttgcaaggcctcctgccttccttctgctggtcctgcatctcatgctcagaggtggcttatttaataaacagcaaatttttcagatctttcgctaagattaaaaaggaaagagaaagccatttttctataagaaatcctggcttctctgttaaacttagagcaagacttcaattaattaacaggaaacctttgggatagaaaccacataaattaaatagatcctgtaatttggaaggcatttagtcatgactcctgggcaatgttccagctggagaaggtggtcgtttcctaagcaggacctgtggaaattttcgtaaacattgaagaaatgttgctggaatttttctccttacttttaggaataatgagattcagagatgacttgcccgcccctcattacccaaggctgggctttttgttttttttttttttttactttaagttcttggatacatgtgcagaacgtgcaggtttgctacataggtatacacatgccatggtggtttgctgaacccaaaacccgtcatctgcattaggtatttctcctaatgttatccctaccctagcctctcaccctctgacaggccctggtgtgtgatgttccccgccctgtgtctatgtgttctcattgttcaactcccgcttacaagtgagaacatgcggtgtttggttttccgctcttgtgttagtttgctgagaatgatggtttccagcttcatccatgtccctgcaaaggacatgaactcatccttttttatggctgcatagtattccatggtgtatatgtgccacattttctttatccagtctatcattgatggacatttgggttggttgcaagtctttgctattgtgcacagtgctgcaataaacatacgtgtgcatgtgtctttacagtagaatgacttataatcctttgtgtatatacccagtaatgggattgctgggtcaaatgttatttctgattctagatccttgaggaatcaccagactgtcttccacaatggttgaattaatttacactctcaccaacagtgtaaaagcgttcccatttctccacatcctcttcagcatctgttgtttcttgactttttaatgatcaccattctaactggcatgagatggtatctcattgtggttttgatttgcatttctctaatgaccagtgatgatgagctttttttcatgtgtttgttggccgcataaatgtcttcttttgagaagtgtctgttcatatgcttcacccactttttggtagggttgtttttttcttgtaaatttgtttaagttccttgtagattttggatattaaccctttgtcagatggctatattgcaaaatttttctcccattctgtaggttgcctgttcactctgatgatagtttcctttgctgtgcagaagctctttagtttaattagaccccatttgtctattttggcttttgttgcagttgcttttggggttttagtcatgaagcctttgcccacacctgcgtcctgaatggtattcctaggtattcttctagggtttttatggttttaggtcttacgtttaagtctttaatccatcttgagttaatttgtgtataaggtgtaaggaagtggcacagttttagttttctgcatatggctagccagttttcccagcaccatttattaaatagggaatcctttccccattgcttgtttttatcaggtttgtcaaagatcagatggttgtagatgtgtggcattatttctgaggtcttgttctgttccattggtctatatatctgttttggtaccagtactatggtgttctggttactgtagccttgtagtatagtttgaagtcaggtagcgtgatgcctccagctttgttctttttgcttaggaatgtctagattatatgggctcttttttagttccatatgaaattcgaagtagttttttctaattctgtgaagaaagtcaatggtagcttgatggggatagaatagaatctataaattactttgggcagtatggccattttcatgatattgattctttctatccatgagcatggaatgttttttcatttgtttgtgtcctctcttatttccttgagcagtagtttgtagttctccttgaagaggtccttcacatcccttttaagttctattcctaggtattatattctctttgtagcaattgtgaataggagttcacttatgatttggctctctgtttgcctattattggtgtataggaatgcctgtgatttttgcacattgattttgtatcctgagactttgctgaagttgcttatcagcttagggagattttgggctgagatgatggggttttctaattatacaatcatgtcatctgcaaacagagacaatttgacttactgtcttcctatttgaataccctttatttctttttcttgcctgattgccctggcctgaacttccaatactatgttgaataggagtgctgagagagggcatccttgtcttgtgcccgttttcaaagggaatgcttccagcttttgctcattcagtatgatattggctgtgggtttgtcataaatagctcttattattttgagatcttcataagtgaaggagaaataaaatcctttgcaggcaagcaaatggtgagagattttgtcacaacaaggctgggcttttaaaaggtctctctccagctggtactgggtggggccatggagcaaagtcagtaacagaggaacagtgaggaagtgtcatcttgacagagcatgagcacagtgtttaaaacctgagtttaattgttctatccttaatggagttttgaaatttcattcctaatttctgcttgaaacataggagtgaaagcaaatacagctgtggggaaacatgttgccccagcctgagcaacaaaaggaatattgaggaatggacagtgtttccagaaacaaatatcaaaaagatggatatcaaaacatttctcagaaatgatatattttattttatttgaaagaaggaaaattgtgtccacaactcttaagtccaatgtcataaaaaatactgctcttctttgggttttaataaaacaccacagtctttgtccatgcctctaagcacacagacaatgagaaagcctacttctgtgtccttccactgttagtcagtcatcactaggggcagaaaaacaggggaaacatttccaagaatgaaagggcagggtacttatagtttccttcccgcttggcaatgtgatgggaaaattacgctgctggaatatgagtaagctgtaacaccaccctgggcaggaaagtcaactgcgaacaaaagttaaattcatgtatttatgatgaacttggaaagtttctggttttttttttttttttttttgagacggagtcttgctttgtcacccaggctggagtgcaatggcgcaatcttggctcattgcaagctccgcctccccggttcatgccattctcctgcctcagcctccagagtagctgggactacaggcacctgccaccacacccggctaattttttgtgtttttagtagagacagggtttcaccatgttagccaggatggtcttgatctcctgacctcgtgatccacccgcctcggcctcccaaagtgcttggatggaaagtttttttaaattaactttcttttcttatgaaaaattatctgtcgtttgaaaagtatataaaaaagcagaaggaaaaaataagaataatttgtagtgtgcctttccacagacgactatttttaatatcttgatgaatatcgttttttatatattcttttagatacacacatatgcacaggctttataaaagtagaattataatactcatgtttttataacctgctttttgtacctaacaatatttccatgtgattaaatattattctcccctgtcatttttgttgcatgcgtactgtttcatttttgcagctttatagcttattatgtacaattaatatacaataatttgaagaatgtgcatagtacagtgaactatttccctattgtaggacatttatattgtttttagggtttttctctgaacttttattttattttatcttacttttttttgagtcagagtcttgctctgttgcctaggctggagtgcagtggcacaatcatagctcactgcagccttgacctccagggcttaagcagtcctcctgcctcagcctcctgagtaggtagggactacaggtgccaccacacctggctaatttttaaatattttttatagagacgaaggtctctctgtgtttcccaggctggtgttgaactcctggtctcaagtaatcctcctgccttggcctcccaaagtgctgggattataggtgtgagctaccgggcctggctttctgaatatttttaaatcagcttttcttttagcaaaatttttgtggatatttaatttattttgttggaataaaattcctgactcagagtatgtatacattttaaagctgttttaaaataagaatagcccaatagcttgcagaaatgttctaatttatactttaccattcttgtaggagtatgtctatttccaataccttggtcaatactcggctggttttctggttttcctcagaaagatagcagtggtatttgtggagttctcactaatctggggaatttataagtgctgttttatttgtttcgttgaggtcatttctccaaaatctggctgtattaggaacattggaaggagtcccatagttattttagtgatatgtaaagttcttaggtaattgtcttaaaaagaaacattaagtgtataaattattagttcctccccactctgtcatacatatgacacagatggaaaagtctagtgctgtgtgtatgtatattacatgtatataaaaattgtcatcatttttgcattaatacaagaacagtcttgaaacaggttccctccatctcatattaacctttcgttattcaaattcttttcatcttgcctgaaccagaggtgttttcattttctgaatgttgtgaaaactgaggtatagcttgaattatacactttgttttgatgttccctagcacccacacttgagatggatttgtatgttttattgattcagcgaaatgtacgttactgagggctgaaccatactcctcacactgggttaggcatgtgagacgtaagaggaggtgcatggaggataacacaaagatgtatatgacagttttccattatgtgtgaccttttccggaattttgccttcacacaaaagatgaatttctgttttgaaactttgttaacctccaaggacacagatgatcagctctaacttatgctattgcctctgagaacttggtgtctcttagaagtcttggctgttctgggaggtccagtgcaggccaaagcgattcatctacttgctgccttgcagccaaggccagctgacaccatgcacgttttgcactttacctcctcagaggccacagacccagacagaaagaagctgctcctgtggtctctgcagtcaaccccagctgtgatggctgccacatcttcccaaggctttctgctgttttcttggagcctgcagtgcactctgcattgctcagggagctccagctggaacagctcttgagggctctcccagaaatttgcatcacaaaggccaaagaggccaaccttcttgggctttgtcagagattgtgtggcagaaaattccctaaacaggatctgccccctcctcactccttttgctttctctgtgcgtctttgtccttcactctggtaatggaaatgagaaagggtcacacagcccatttgaagaagagattatcttctgttggcgaaaaaaaaaatgccgttccttgggctgaggtgagaggtttctggccactgtgaaacatcaacctttccagagtaatttctcttctagtcacgtttctctaaaaaaataggtatattgagacacacacacacacacacacacatataaaatcccacttagggcaatagacagatgttgcaacaaaaatttctcttctccttatgcataatctgaagccaaagtgaggatgcaaatttgaggagtaagaagcactgtgactcagcactgagttatgtctgtgctctggtcagggagagctctccaaggtcagggatgctggaggaggcggaactcatataaaaaccataagcatgctcaggccccaggccagaaagttattttaaaagtttacagcaactactttatgtattacacacacacacacacacacacacacacacattttatttcaaaaccattttaaacttaaaacttgcaagaacagagcagaaaatcccctcttgctcttttcccagagaccccatttaagtttcacctgttgtcccagctctgtcctttaatggaaagaatctagctccaggtggcaccttgcacccaggtggcccgtctcctcctagtcccctctgatctggaattgttcttcactcgctccttttctttcatgactttggtgtttttaaattataggtcagccattttatagaataccctgtaatttgggtttgttaaagggtaatttgttaaaggtaattttcatggaaaagtaaaatcataactctcatacagatgtgaaaattgattatacaaattgggtaattcttgtcacactcaactaagtcacagttgaggagctgaggcagaaagcacatgggcacatggcacctgctccaagaatcgaattgtctgcaagtccagctgctaagatggcctggtgtaaccctaagaccagtttaatctagtagctgctgaaatgacctgctgtgactttaggactggttttacctaccactgtcactcaccaatcagagcttagcagctctcaaaaattctagtgcctataagctttctttcaaaaccgtaggtaacattcctatttctaataaaactcccaacctttcctttgttcctcagacataccaaagtctaccagtctatgtgtatgcttcaaattgcaattctatgattctccaataaaatgtttaatttagaggtttccctctatattacattttgacttcagatatacaaatatgtgttaaaataatttattttactcatatgatatgatgaaactaggcagatgttataactttaaagaaaaagtcaaaagagcacaaatttatatgaagcaaaggaatgttgagatgaattgcaaatgaagacacaactagttttccaccagtggaaaggaagtcaattaaatcactgccagacaggagatatagatagatagatagatagatagatagagatatatatagatagatatagacagatatatacagatatatatatagatagatatctatctatctatctgtctgtttatctatctatctatctgtctctccatcagttacctacatcttaacaaagcgttgtaaaataactcaaagccaacaggactagaatctgatagcccaaaaggatatgttgtaggcgctgcttagttttctactgaaacacaagattttgttttttacagatttatccagtgttctctcatcacaacaaacattacaacaaaaatttctctttatgaagacccatattgtatgtctttggctggaatataacagatggttgtgattttttttcccccatttcgtcctgttgatggcacatggtatctctttgttttattactggttataactttgaccacttcattaagatagcatcttccagatgtctccactataatactttctccctaccttagcagctaattcatgaaaagtttgtagggagacacagtgaaactatgtaaagcctcattaccccaatttcacccatcagttttggcattgacatttcttatctgaattaattattgctctgatgatttccaaaggaaaattttctaatactatgatttcttctacatgtattagttggttttctttggtagtaagagctctgttttttccctacgtatttattcacctacatgtttatctccagtggggagctcataccagctcctgagagccacttttgtacaactctgttctgctctgcgttcattgacctcatgttggttctttaagttggccatagtgagagtcgttacactgtggaaatcggaaaataatatcaagcagattcgtgtgtttttccccagagatctggtgtttcaacatcagcacatcactctataacaatgtggactaattcattcctgttttattcagtgggtttaatctatcactattattattgattttgatgctcagcgtgtccctgatgtggcctgtgggagctctttcaagctgacttctgtgtccttttgacctgtattgcgttatgttttgagcatttctttactttctggctcaacaagatgttccagaactatctagatctccttgccccacccctaatacgagccacttccccaaggagccctggttccttttagtggagagtagcctctggcccttgcgtgctgccaatttatgctcaggcctgcctccccgtctcaccctttcaccctgcccaatgcctttttgatgaaggaaggatgggaaatagtaaatattttttaaaagaaaggcaggtaaaggagggggagcagaagaggaataaaaatatctctttatatgcatttttaatccccctcccacaaattttaccagagactaaatttagtctttgcctggtgatttggatttctgaaatggttacattttatgtggttgagaatgtgaaaatttctgaagagcaaaatcgtttgtcaaccgtgtattcagtccctactctggatgtgcctcacattacgctattgtcacagtgcagagtcctagccctcaagcagctagaaggacagtgagatgtcctgaggcttatagctgatgtgtcctcagggcctgtggcctgcgatgcaggcaccatctatgctgtctgaggaagagaaatcagaagtcagagagacttcctagaggaccccagaatgagcctagaatgagatgagtttgggggtaggacttagcgagttgggcaaagaggggatggatgtttcataaagagggaagatcatacttaaagccagagagatttggcagacttgaggaatgagagatggtttggccagttttgaaacacttgtttcttcatattcttgagcctagtttttttaaaaaagcataagtatcctttattatagccagatttgcctattctaagccaccagcccagagttcagttttgggatttaacactagtgcaatgtcttattgcaaagagattgattgcagcatcttcccacagaagaagccacctgagagagaaaagagaaagtaaaattagtggacattctaccaaagaaagataataaaatatttctttatagtctagtggtttttgtctcaatgttttttcatttaaaatgtatcaattcctatccctatgggtaccccaccccgctccattgaacacagacccattctgatctaaatggacggttttggatgcctttactcataagcaaatgcaactggttaatgacagtagtttaatgctgatcttttgattgtttgtttctgatcattaaagaacaccagtttattactttgaatgatgtcttgaaatggataaaattcttttacttcatggcagttaaatctgtcctaaatctaatcctgagttttcttcaagatatgttctttgtgtaaaaattgttgcttttaagtatgctcctcacatggttgtttttaaattttgcaggcgataccagaaattgcagaagatcatgaagccttggtaagaatatttgatcgattgatattgatgatttaacccttcctactttcctgcataattgagccctgtcatctgactgattgtataactatgcatctagtattttgaataagtgattttttgttatttttgttttctatttgatgttcttttataaacaacttcttcaaaaatgtattttcccccctttttttgctttggagtagaaagaatattttatgtatgtaaccactaagtgatgctgtaaccacagaaagattgctaccctacttctggagcagtgctaagcataattttatgtattattttaaacaaaactaacttttatgtggcctgtgtgatgttcaaagtcaaaagtctttgattttcttcagtggcttagaaagaaaacggattcacatttttaaaagtatccaggattgaaggatgcaatgaaaattatttactttgagtctgagaaagtgctcgatcacctatctatgaagtgaattgtatgattgtgtctgaagatagaaaccttctttcttagagttttcccttctaagtttctttcttaaccattaaacagggtgagtccaaatatggttctaacaaactgtttgaagtaggccgaacagattttcatggtgccaagccattaagcagataatttcagtttgagaaggaacactgaccagcgtctcaaagtgtgaaccttattttgtaagctctcagagaaaatcctcatcaccttcaatgtactatagtattatgctggtctcaaatcattcacacacagaaaagtatgagttgcaggaattcttctgtttattaaattctaataaagtagaaagcaatattgagcttctagggtaaagcttcttaaatttcattttgatgtatttaatacagtagaagcacttaatggtaatgacagtagaagccactttttatgagactttatcctgggcattgtctcaatgtttacactcattactccaaatccacacttacattcaacatacaagctcggtatttccttggtgcagaagttaaaatcagatggaggagctgggattcaaacttactttctccccatctacttaacagaatttgcaaatatagaggaatttggggccctgaagccaaaataatttatttaaaatttattagacagtagttttaatcttttggtatgtagatatgctggacagtttgtagtgtagttcatgatttttattgataaatcatagacagaaatgaatagtcaaggccctggttctggtaatggcacagtagcacaatcagactaacacagataacaattatgaaatccggacaaaatattataaacaaaacatcttaaaccaactatatgaaggcactggatagcaacccaaaacaggcagaaggtagagggaagttaacccttgagagaccagatgggtctttgatgggatttgtatgtttgaagctttttctctgagaacacctactcatccaggcagcatggggtggcagagagcctcagtcttagtaagttactaagaagatgtagtttgggactgcagagcagctagctaattagagggaatctatgaaagacgagaagctcagagagtaggagactccacatccacatgtaaaccctgtcgcagtccactgctgatcactgaagtgcaaatgcacactttaatggtaaaaacagcaacttaaagatctgagcaaagatgtcagctgtcactcacttcagaatttagatttttacttcctgctagaacaaaaattatcactcttcagaggaacaaaactgatatctgaatattgacagtgttttgttcacaatatccagtatataataaaaatgtgctaggtatgtaaggaaataggaaaagacgacctatagttaagaaaaaatgtaggtagtaaaaactggccctgagatgacccagatgttggaattagcagatgaaggttttttaaaaacttttataaatatgttaaaaactaaagaaaagtatgagtgtaatgaatgcacagatggggagtcttaatagagaaattgaaaccataaaaataaccagatgtcagttataaaattgaaaagcacaataaagtgaaaattttactgtatgaggttgaagatgtcagaagaagagatagtagccttgaagatgtatcagtgtaagttacctaatctgaaaagttgataaaatgaataatgagtacttgacctgtgagataataagttatctgaaatacatttaattggagtcccaaaaggagaggaaaaagaatggggaaggcaaatatttgaggaaataattacagaagaaaataatgatggagatatatgaagcaagttcttcacactggagagacatgatagtagatagatactcagatctgtaggaaaatatgaagaacaacagaaactaaatatgtgggtaatataaaaagacaaaatgtagttttactttcctttaaatttctttaaaaggctgtaactatataaagcaaaaattataatactgtttggtagggtttatgacatatgttgatgcaatatgtatgacaatgagagcacaaaggatggaggtataagagcaactacactacagcaagcttcctagtgtataatcttccgtttaagtagacattaatatactaatggtgcacattgtaatacacagagtcacaactaaaaacagtgcaaggaagcataggccaaaacacaaaggagggattaaatcagactactaaaaaaatttgattaattcaaaagaaggtaaggaaagagaagtagaataaaatatagttaagacaaacagaaaacaagttggttgacttcaatctaatcatatcaatacattaaatgtaaatagactaagcagctcaatgaaaaggtttagattgtcagatgaaattttttaaaaagcatggcccagctctatgctgtttataagagatgtactataaagacaagggcacatgtacgttgaaaataaaaggatggaaaaacatataccatgcaaatgctaataataataaaactgaatggttttattatcaggaaagataagacttgaaagcaatatgttatcagagttaaagagggataattagtaataaaaatggtcgcctcattaagaagatttaatcctcctttttattttaaatgtgtatgcacctaaaaattttaaatgtgtatgcacatttaaaattattatacatgtgtataataaagttttaaaatacgtgaagcaaacactgactactaaggagaaaaagaggcaaacccatcagcatagttgatgattttaagaccagtctttcctaactggtatgaaaactaggcaaaatgttaaggatatagatgatttgatcaacactatcaaaggtcttgccttaattgtcatttataaagcatcagactcaataacagcaaaatatacattattttcaaatgcacatggaatgttcatcaaaatagtccatagtaaggctcaagaattttcaaatgattaaaattacacagattatgttctttgatcacaaggaaattaaattagaagtcggtaacaataaaatagccgaatagcctcggatgtttggaaattagaaaacactctttcatactatcaaagagtcaaggaataactcagttgaaattatgaaatattttaactgaatggtaatgaaaatacaacatacccaaatttgtgaatgcagctgaagctgtgcttagggggaaatttgtagcattaaatatctatgttgaaaaggaaggatggtttaaaaaaaaatggtctaagtttttacttaagaagctttaaaaaatgtgaattaagtagaaaaaaagaataataagaatactaaccaatgaattaggaaacaggcaaataatacagaaaattaaagccaaatatttattaggaaaaaaaagaaaagagaaatccaaatatcaacaccagggataaaagagggaatatcactacaaatcatactgacattagaaataaaataaaagaatattgcaaataattttacattaataaatttaatgttttagcacttggggaggccaaggcaggtggatcacttgagcccagcagttcaagaccagcctgggtaacatggcaaaaacctatctctacaacaaaattcaaaaattagctgggtgtgacgccttgtggctgtagtcccagctacttggtaggctgagttaggggattgcttgagctagggaggtggaggttgcagtgagccaagatcatgccactgcacttcagcctgggcaacagagtgagactctgtctcaaaaaaaaaaaagaaaaaaaaaaagaaagaaaattaaggatgaaatagacaaatgccatggaaaacagatttaccaaatgtgttagtcatggaaatgcatggctttgatctcctttcaggaagaacttgctagtcagccaagaagagtgcagttacctgatagttttcagttatcacatgttccagattcatagcagctttcagtactctccaaaggcagcatttagttattgaacatggtggggataccagagcctggtcatttctacccattatgggattcctctaagaggcactgtttattctgcagcgttccactgagttggctgagacattttcagatctgcatttgcttcttccccttcccttcgcaggcatcagatctgtttcatggtcccaaggctttccatactcaatcctgctttctgcctgctttatcttccacaggcattgcccaaactcgtactcaatctctgttctcataacttagtctcagcatctgcttcacagaggactaaaactgacacatcaaaactgactcatgatgaaatagaaaatttggacgcccatagttattaaaaaaattgaaattggctgggcgcggtggctcacgcctgtaatcccagcactttgggaggccaaggcaggtggatcacgaggtcaggaattcaagaccagcctggccaagatggtgaaaccctgtctctactaaaaatacaaaaaaattatccatgcatggtgacaggcacccgtaatcccagctacttgagagactgaggcagagaattgcttgaacccaggaggtggaggtttcagtgagccgacgtcgtgccactgcattccagcctgggcgacagagcgagactccatctcagaaaaaaaaaaattgaaatcatttctcgaaaaccttcatacaacaataacaggttacactggtgaattctatattatatattatagaagaaataccaaatctaaacacatgcttttggaaaatagaggagagggaccagttctcattattttatgataccagtatcactctgataccaaaacctggcaaagacaatacaggaaataaaaattatagaccagatgcaaaaatccacagaggcatgttaataaatacaatcaagcaatatgttaaagggataataccttgtgatcaataagagcttatctcagaaatagtttaacatttgaaaatcaatcaagcagctcagtgttttatgaaataaaggagaaaacctaaagagaaaaatcatcttaatggagagaaagcatttcataaaatctaatgtatattaataataaaaattctcagcaagctaggaatagagggaacttcctcatcttgataaagtaatctacaaaaactccatcatacttaatgttgaaagactgaatgttttctaccctacagactgagaataaggcaaatatgtttgctttctgcagttctgttcaacattgtataggatttcttagctattgcagtaagtcaataaagaaactaaaagcataatataagaaaggaagatgtaaaactacctctattcatagaaaacatgattatctatttagaaaattcttaggaatctacaaagaaactgctagatataattgaatttagcaaggtttcaggatacaatgtcaataaaataaaaatgaatttttatattttaacagcaaccattggaaaatgacattttaaaatttccacttataaagtatcaaaatcataatttgtagaaataaatctttatttttagggataaattcatcgatagacatgcaatatctatttatttgctaaaaataaataaatgaggggaaataaagacctaaacaagtggagggatagaccatttcatgtggtggaggacacaattttaattagatagcagttctcttctgacatcctttggcagggacacagagccaaagcatatcatctttatactataggttcagtgcaatatcagttattttttaaaagaattacaaatcaatcctaaaaccactggtaatgtgtgggacctagaatagccaaaatgatcaacaataaagttgaagagtttcgttgactgatttcaatacttcctataaggttagctatcaagatggtctgatattggtataagggggtagataaacagatcaatgtagtagaatagagtccagaatcaacctgcactgaaatttttaacaaaggagctagaagaatgtttgctgacataagtcatgctttttgaaggtaaggggtgtgtctataggatgacttataaatccatacctttcaatgtatatacattttacttcctcaaggaggaaaacagatggaaaaactcaaagggcagggcagaactgtggccattaaccttgacaattaaggatctattgagtacaatttatcatagctttaaaagtggcctttattttcatcttttttcaaattctgtattggggccgggcatggtggttcacgcctgtaatcccagcactttgggaggctgaggcgggcggatcacctgaggtcaggagtttgaggccagcctggctaacatggcgaaaccccttctctactaaaaatacaaaaattagctgggcatggtggtgtgcacctgtaatcccagctacttgggaggctgaggcaggagaatcgcttcaacctgggaggtggaggttgcaatgagctgagatcgcgctactgcactccagcctgggcaaaagagtgagactctgtctaaaaaaataaataaataaataaaattctgtattaacgggcttgccactccatggaaacatttggaagcactattcttttataaaattagtagcataaatttacatgcttgttttgagattggctgaattttgttggaatgaagatggtgtctactaagttgatgagaaacatttatttgaatcattccagcacacatggtgtgttggctgtgacagtggctttccaccagcatgtaaagtttgcagttggcttaatttgtggctgtcagtactgcacaatctttagcctaacagtttacaaaatacaaataatccaaacaaataaaaatgttcctggatgtgccatgtggttgctttatatttgtaattcttttagccttgactctctatacccagcattgatttcagaggtagaacttgccttctgctttcccggtttggagcctgaattactcctctaggagtggaaataaacacctatgtcaaggttcagtaagagcttttatagccatctcacttgaaagaggtgattgaatcccttgatttggaatgtaataaaattttagcatggccatcctttctttgcaactgagagtttgaagttgaatttggaaaaagttcttccatatgggaacttactatgtcacccagcaaccggtcctaatgaatatgttatatacagaatatgtgtgtaatacagaatattatgtaatatgtatatattatatacctatgtgtattttacataaatattatatgctagtaatatataaaataggtcctattatatattcctatctgtctctgcctatctgtcatgtcattagatagatcaagagagctatccttcctctgagtaccttgactggtgtatgctgtgaaaaagctttactctcacttaccaatcattcccactaatggatacttgagaagcacatatagctctatttgcagtctcagaaatggtgctgcacctccttaacagccatagagattgaaatcttgactcccaaacaagcatggggatttggaaaccaaatgatactctttctccttctctccagcttttttttcccaaagtccttgcagcctgttctgtctgaggagtctgtagacagagctctggagtgtagttttgggacgattgactgtaccagatgttactaagatcatttggattagggctctattgagcaggtagctagggagcagagtcatattgctttcatatattagagaacataaatatactttatcttttgcttttaaaggagctactgaagactaatgtcatctggtttcctgatcttatctgagtgctgtctagctaatgggaatgcagagaagagtattttttgttgtttattggtttatttgttttatctttcttcgagacagagtcactctgtcgcccaggctggagtgcaatggcacgatcttggctcactgcagcctccacctcctgggttcagccttctgagtagagtagctggaactacaggcgcccgccaccatgactggctaatttttgtatttttaggagagacggggtttcaccacgttggccaggctgctctcgaactcctgacctcaggtgatgcgcctgcctcagcctcccagagtgctgggattgcaggcatgaaccacggcactaggctaatagtttgattcagtagtgtgtgtgtttctctgccactgcctgttccattgcctgtgctgctgttgatgttactgaggcaggttttttgccttgtacagatgctgtgaatgctgtcctcccatggcgtgtatatgggaatttttttgacatttgaggtcttttaatatgctgggtatgaccaaatatccactattagttatcatttggttcttgtttttcctctttttaagtaaataaaataaatgagctaattttgcttactgctcatgctgtatgttattatgtaatgatgttttcacagtaatactaatgcctacccagtctattaataaatcttactaattgcttttatttcctggctcttattttcctgaggcagtctttttactttcttttcttcttcttttttttattttgcaatctgatatttggattttcttgtgatccattgtctgtagaaagagtcattctggaatttttctttaaccttactcaatactctcttcaacccattattccacctgtctttctaatgttctgttcttttcttcaaataagtttgtgttgtctggtttggaatttctttttgaggcatgatcctttgatgccacctagggggcacctgtaagatcgaggttgccctttgcagctctgaaaagccagagatattagctgcttttctatctggtctgaatggtttggctttccttgcattgctgtttttgttttcattttctagttctaagaacagagaatccttaacacaaggtgaaacatttgaaaatcttgtccttcattcacgttttaaaaatctcacttttgcatagtgagaatgtagtaacactcacacgctacttacaattcactgcacagcatttggagggctttaagcatgtttgcttgttttcatttctccaaaaatctctgagctagttgtgactaccactaccatcatcatcatcatcatcatccccatttttaataaatgaggaaagagaagcataggatggtgcataacttgcccacttagggctgaagggagaacccctgctgtctgactccacaaactacctacttagccgttttcgtttagctggttgcatcccctctgttgcccctggtctccggcagctttggatcattgtctttccctgagaaccacttccccttctataggttccatttagcattacatcttctgtggtgatgcagaatttcaaaggtcatttttgaggctgggctgagtagaacagtaggaagaagggaaattgagaagctgttttaaaagaaatgttacctgttttctattctactagttggaaataaaactagttggaaggttcaatctaaatatgttaggagactttgtaggatatcaataatggtatgcatgagcctacaaatgaaaaatctatataaccaactttatttttttaaaaattgaacctaggaatcagtgctgttacataatacagtgtacagatcctgactggcataattcaatgtactcaaagaaagagtatttatcataaaggtgttaatacttataatgatgataatttacaataaaggtgaatatctatgaaagattctgtgtatctaagtctctgctaaagtgttgttttgaaagctgtagacaccaggatattgtctaataagggtcctaggtggaactgcatttgcccaagcctaatctctgtttggattttcaaaccacatattagacccaccttatagcctactgaatctcagcaagtcttttggtcagcaaacccattatgtggagtgattatctccatcgatatgccagaaaagttactaactaaagacgaaatgctggccaaaatcaaaatgagtatgtttacttgcatacatgtttgtatctgtgtgtccacacagagggatgtatagaccacttaaaaaaaagtactaattctcttaatagaagtatttttaattttctctttggatgtgtatgggtaataaaggaagcacattgccctgcctaagcagctccaaatttcattagccaagaagcttttctttaagccaccatttactgagtgtctatatgctacatactttattaagtaagtagctctgtggctagatagatatcaccatctagtttttcagctgaaaaaatagaggctcaggcagggtcagtgaattgcccagaacaacacagctcaccagaacgagagttggtgtgagcccgggtctgttggatgctgaagccctggttgacctcatcaaggccgtcctgcccaacctcatcaaggccgtcctgccccttcatgtcactcatgttagtgaagaagtcacctgtggtcctgctatttgtctcttgatcttttaaaattctgcttgtattcactttcccagaactttcttgcttctgtgtctttgctcagctttggggctcttgactcttgtgcctctctgtctttttcagctttggagacatgctgtccttcaccctgacggccttcgttgagctgatggaccatggcatagtgtcctgggatacattttcggtggcgttcattaagaaggtaaggtggactctgcctctttaggctttccttactgtcttctgtcatagctatttttctctgctttgaggatgtttcataattgtctttcctttagttctttatattaaaagatgggtatgattttttataatattatgtatgtgggggtcaggaaacccaaattctgtataaaaatgattgtaagagattataagggattgcatgtgcgcacccatagctcagaccagataagtgtgtcacactgttaataactgcacaagtgtgttaattccccatgtgtgactctgttggtttcaagacctaaacagagttcctactgtcatccttcttgagcctttaatccccaacctggtgtccagggaaaaggaaagaggcaaagtatactgatgacctgcacacctaggtttgaagcagggttatatgaaaaggagggatgcctgagtccatgtgtcttaagcagagtgagcctgcttacttgtaatcagggtgcaaggaatatctcagacatcacccagttctaccagttcttcatttgggaggaagcaaatgaagatggacctggtgcaggaagatggggcagaagagccctaccattccttgcaattgaagtgtaacaaatttgcaactctgtttccattcttctgactaaaaataaacagtcttgatcttgtcactcttaaatgtagattaaatcatggacaattatcatttattgatttattttttcctttctttgtatttgcgaaatggtttataaattcattggcatttctcctccctactactgtattaggaataaagagatgtttggaattcataactttattttataagtatcggttactggaaagagaatttcagtgaatctgtgcaagccagaaaatcagagcaaaatccattaagagtcacttgaagtttttaagccttttattttaaactaatggtagacttaaagaaaagttgcagcaaattggactttgggaggccagcgcaggtggattatttgaggtcaggagttcaagaccagcttgaccaacatggtgaaacctcgtctctatgaaaactacaaaaattagccgggcgcagtggtgggagcctgtaatcccgcctacttgggaggttgaggtaggagaatcacttgagcctgggaggcagaggttgcagtgagccgacattgcaccactacactccagtctgggtgacggagtgagaccctgtctcaaaaaagtaaaaaaaaattagtacagactgttcctataagcccttcatccagcctcccctaaagttaacattttgcaaaatgacagtacggttatcaaaattgataaataagctgtggtgcaatgccggcatttgatttcacctgtttttctatgaatgcctttctctggttaaggatctgatccaggatcccacactgaatttggttgtcatgcctccttagtgtccccaagtctgtgacagtccctcaggttttttgtttgtcatttatgattttgacacttttgaaagttaacagtcagttattttgtataatgttcctcaatttggatttgtctgatatttccctcatggttcaattaaagaaggttatgcatttttggcaagaatgctacagaagttatggcacatcctcagtgcatcctttcatgggcatatgatgtcactgtcctctgactggtgatgttaccctggattacatgattaggtggcatctgtaggatctccccactgtaaacgtgctgctttttttttttttgaaattaatcattatcttaggggagatgttgccttgaatcgaaggacatgagatggccctaatcggttgaatgaggggggtaggatcagaggccccacaggtgtcatgtccgcactatgttttatgttcatttaagacaagagctgattggaaacccagggccttctcaacacatctcagaatcaactctctttccttatgtaaatccataaagccaaaggggatgagcaaaaggaaccctgtagaaaacacacagaaaaggaagaggcccctttttgcctgtatttatcagtggtatgaattgccataaaggaaagaaactgttggaattgccattaagagtaatgcaaaaaccgcaattacgtttgcaccaacctaattgctaaagaagccaaagacatcccgatgtgttataaagtactttcctgccacctttggtggtggcagggaatgtaagcattagattatgagaggaaaaaataaatggcactattttgcctctctaagatcagttccagagaagcaattccaaatctgaagatagtgagtatcattgattttttaatacttaacaaacattttaactttttgaatttacagcaggctttcttttctacctccagagtgcccggcttgtctgttatgagagcctcttttgctatagaatgtaacaacaatgttgtactgaatgtgaattccttgaaattatgttctactttcaccaacattagctcttttgattccccacagcaatcctttccagaacagaacagatagtcttgttatttctggttaggaggcagggatgcagtggcttgccgaggttgaatgaggtcacatagtgagtgggcgtccttggtcacatggtcagggtgcttctcctcctcatcatgcacctgtgctttccaagtggtggaaggcatagttcccggagccttgcttaaccagcctgtctcttacatattcctccctgaccttactgcttagagttaagcaatttcttctgctctctgttcccctgggatctcctgaatgcccctgttccagcacttgtcacatttcggtgaattttttattcatttaacagtatttcccaatagagtattacctcaggaaggcagaaacgtggctttcttcatgtctttatcctcggggcctggcacagagtaaggtcttaatacatttctgtgaaatgaatgaataaaatttgcttggaagcattaaaaatacccacagaatttgaagaagagaaggaaaaaaaagtactgtatttaaatatattttaagtaaaatttcggtgatgagtggaaaggaattagaaagctgtgtttctttaaatgatgtgagcaatggccaaagagaatgacagtcatttaattttctaacaacttaagaaaatgtttttcattcattgaaattaattcaaaaatcatattaaatgtaagaaagtaaagactgacagtcttggtggtttaaataaaaaattaagtattttttaaaaagcagcacatttaatctatttcatgtcctcattcccagtctcattttctttgcattgctacttagagatctgttacatgaatttgaaaaaatagtcatcagaaaattacttacttttctgtaaggttaacttttttattcattagctggaccaaattcagcactttgacaacccaggaattgtatgcaggcaactgtcttttaaatggagctttatctcaacaaaaatcgactaggaaatgggctgacaaaagatgcctatctctgtggtctagagttggcttcctattaatgccaaattcataccactttggagaaatattttttttccctgccagcctctgtctccttctctattactttatctgttttgttatgtgtgaatctagattctggtttacaaattttggctgcaataaatagcatcatttcataaacagctctgaaacttggaattccttgataccaatatataatgttgcattttaaagactcggctacttagggagagagtaagaaaatatggagtagaaagaaaagaaaaaaaaactttaggtgttatgagttggtttttccctagccaagtataacatcagtgccttcttttggaaggaaagtttcatataaatgctcttgaaaccctagctgtgcaggagaacctggcttaccccgcaaatgttttcagtgcctggacaaacatcccaccattttgctttagagacctggtaatttttgcctcttaaaaatttgagagatttacaggcatctacctagataattttaaatacaggagtggagcttcatgttctccatggctggttttttgttttgttttgtttttgagacagagtctcgctccgtcacccaggctggagtgcagtggtgtgatcttggctcactgcaacctctgcctcctgggttcacgcgattctcctgcttcagcctcccaagtagctgggactacaggagcccaccaccacgcctggctaattttttgtatttttagtagagatgggggtttcaccatgttagccgatctcctgacctcgtgatccacccgcctcggcctcccaaagttctgggattacaggtgtgagccactgtgcccggccctccatgattcttttaggttttgataacataggagaattttaagatctcattctaagtgattctaagaagtatttattggatcgttgattcatgcactgtaatgccccttagcttcttaaaagttacataagtatttctcttatttagccaagatttttaaatgaatgagcagtacaaggagctagtgtgtataattaattactgctaactcctcttgcttcttccttatgttacaggcctactttcgagaagctgtactgtggctggcttgggttggctcacttgtgtcacccaaaagtacagtaatggagctgggataaattgaaaggcagagggaatcattattactcttttgggggataaaggaaatgaaaatttaaataggcgtgaataaccttctctagctatatgaagatctatagttttcaaactggacgtagagacatgtgtccattaactaatttatacattcagttataaggagttggtctcaagctccctggaggacgacagttattacattcacttggatcagccctgatgcgttggttattaatactcattaagtggaagtattaggtcatttgaatatctggctaaaaccagtgacaaataaaacaaaagaaagaagttaagtttcagaaaaccattagcatctacttcagacttgtacataggactgtaatgcattgagtgccccaggtgtgttacacaaaatgctcattatgtaacatgctttaggattgctgaaatgattagtttatttatgtcaaggaagaggtgaattactaggaacatgaattttaaagaatactttcatgaaagtaagggattcatttcttaggagaaaaataatgaatggaaatggaatatgtatgtgggatataaatatgcctgaattaaagcaaagacagcaaattatttttaccaccattgagcaagcccactggcagcagagaagagttaatgatttatagagaactttaaaacccattatgagaaggtatacttcatatcagaaaacactgagtgtaggctgggtaccgtggctcatgcctgtaatcccagcactttgggaggccgaggcgggtggattacttgaggtcaggagttcgatatcagcctggccaatctggtgaaatgccatctctactaaaaatagaaaaattagcttggcgtggtggtgcatgcctgtaatcccagctacttaagaggctgaggcaggagaattgcttgaactggagaggtggaggttgcagtgaactgagatcataccattgcactccagcctgggcaacagagcaagattccgtctcaaaaaataaaaaataaaaaagaagaaaacactgagagttctgattgaatatttcaagaaaggaaatattgtaaaaaggatatttatggaagtaggcaactaattcagggggtaaatttccatttgatggaaaacttgaacataaaataaactgcagaagattatgtttcagtaacccagcaatgagttagaccactgggccagtgttatttgtatatactctgtatcaaaacggagacatgtcagatgtatcacagggatataaaataggcagctggaaatatgaatcaccagtgattatggattcttagaaaagagtgataattgggaagagaggagtaggaagacaatgagattgataatccccctttttaatttttggcttttttggaatatccaaatggtggcatccttttggatgccaagaataggcccgcagtgtacttcatagtaaatgcctttttatctgtccatactagactgtaaggtccttgaagtttgttattttcatctttgtatttccagctctgtgggacagggcaagcctgttacatagtacacacgcaatgcatgttactgaaatggatcacttaatgatgagtaaatattggctgaatgaaaagagtggataaagatggaggcggagggtgcttgacaatatcagcaacagcttctcaggcagaagcctccatgcatccttaaggcacatccaaatttaataaatagagacaagcaggggagccgggaatgaggagaaaattagttgcaagaaaatctgaagtattgtcaatgaatttctttatgagttcttcagtttcctaataccagtgccaagaattatgccgagagcgtgaaaaatggtttggtggggtgggggaggagtcagataatttatcctctgtttagaagatgtctaagttaagtattaaaccctgaacacagtgtgacaataattggatttttgtcagagaaagatggacctagggaaagaagggtggccttagcatggtagatttggtggattggagcagactgcgaggaataagtcaagggcttgccaaggatagtaaacatgtcggagaaggttattagccatgagaagagctgaagcagtcttttgagaacctgaaaatttccatactcttcctgaagtttgtattttaaaataatagcttttcggaatgtaaaatcataatgtcactgcacttcttcacattatttcccacccctgagatccagatgtagctggggtaggcagagtgttggtatctgcgtctcccacccctcctttcacctggaaatcagcggactagggacaattccgatggtacctgggaactgccatggtgtgctgtgcatttatcatgtgcaaagatggagaggagatgaggcaagtggtctctggggcagcaaaaaagggagaaattagtgttgacaggggggaagcagcaagagtttacttgtcgtggaaccaagttatttagcttttaagaacagtcattatgctgatataataatggctttttattgtgagctgtcaacagacagtaataacttttaatgaggcctctaaaataaaacctttatggtacccatgtgtttggattactgcgatccattattctaacctctattttattttccgctcacattgtgatttattatgtttggggatttagtgattaattccttagagaatctattttggagcttaaagtagtattttaacttttagtactgctcacttaaatgatttcctgtttgctaaatttgggagagatgaaaagaacttgttttaaccatcagaaattggaagaaaggggtaacgagtttttcgtttaagagagtggccggtgactgagaagttgccagttgaattgtgttgacaagtgagatttgtgcgagtcccttaagaatgcaacaagaacataataagcatataaaagccatggattgtgtggatgaaggagtagcctgggaatgcaagaggaatggcaattaacatatgttgacattaccatcccagagaaacacaggtatccttacaatatatgtgttgaaattgtctgcccctaaaagatgaaactcaggagaataatcctaggaaatacagaaagaataatccttggaggtgtgtcttttttaaaacatttgcttatcagtgaattatagagatgagataaatcatgctttgtaatgatatcatgaacaatccctagttcaatgggtttcttgctattttgctgtaattccaggtcatcctcagtgcctggtgtttcttaaatgagttcccgatttgattcatttgttcccttctccacgtctctgctctacttaccacgagcagtcaattgtgtcccacttggattttcagatagcaagttttgtgaacaagtcagccatagacatctcgatcctgcagcggtccttggccattttggagtcgatggtgctcaatagccatgacctctaccagaaagtggcgcaggagatcaccatcggccagctcattccacacctgcaagggtaagcatgccaagatgctctggggaggagaaatgcttcaggaagatggccacggtaatgcactgggaaacgttttatgttgttatagtttggttaaatgtacagaaaaagaatctcaatttggcatataaccaaaccacgtgtcacactggaatggcatggttactttcccttggcctctgtccctcactgaactccaagctggttcttggcattgcctgtccccacgcctggcccttggtaagctctcagttttaatggatattggtagatattggcagagttttacttttaagaagataaaacaggatgatttgttctcttaagttctctttcttaaaccatgtaagttaatgttttctgtgatataatgagtattttcatagttaattagaaatgtaatgttatgcatttttactaggaatttttaaaggcaggcttctttcttagttatgctcaaggtgattctagtgagcttcttcttttgtattttataataaaatgtaggattttttctagtggcttgagctataaaatggacataagatagctgcccctgcagcctgcagtctttgaggcatttttccccttctttcctccctgaggtaactaggaaggttgtctctgacaataccaacctgagaaggactctattgtacagtgctaccttagaaattcaagtattttggattgcagtgataataaacattatgagcttgcttacacaggaaaggaggttattggaacaatactggggtactttgtagaatccagaaatgacataagtagctaagccttgagaaggagagaaaccatagcttccccggagtcctcagcagatggccttttctctagcattttggttggcactacagtgacccaactccccctaactgttgcccctggtccattaggtcacaattacaaattctcaagaggaaacccaattggcccatttgggttggtggtgcagggtgggaatggttctctgaaatgttaactgttgtgttgataatataaactaccaaagcagattatattagatattattttcatttggaggtgggaggattaccaacatttaaaatttaagtcacagaagctgaggattgtggtggcctccgtgattgtggcctcagaatcataattcttcaaaatgatgataatgtaaggtagcttctctagaaataagaccagtttcacatttcctttgaatgtgaactgtattaatttatatactgtgtcttttgtgggaatctcaaaggcacacatcttcatcccaaagcacgttaccaaagtggagagtttattattctccaagtactgtgctaaggattttacatgcataatctcattttatcttcacagcaatcccatgaaataagtgtgtctaaccccatgttgtagatgaggtaactgtgccttgggggatactcatgaacttgtccaaggtctcagccagcctgtgatgaactgggctttgcaccctatcctggcctagttctaagctccacctctctctcactggcctgataagttattcctaaatgtagctcataagtcactctttgtttatgccttgagtcctccttatttactgtttaccacttgccttacattagagctttgtttcattttattatttctggttcctttccagtgaaaatcagatttataaacaaacacctgttctttttgttattgaaatgtttatatttggaaatagatttttagaatatataatagagccatccaattagcccaagaatgtggagacatctgaaactactccctgatatatttcatgtatcagacagaaaattacacatacatacacatacacatacatacatacagacatacatacatctattactagtagtacatcaattacaacatcccctaggtttatgcctttaatctgaataagagagaaggctgcctatatttctgggcattctgcactgaccagtgtactgtcagctagtaatagtagttgtatatttaccaccttgtgatgtttgaaatgcattctcagtgcaaaatgcattttctaggccctgcctttctctctcactttttttggggggagggggctgattttgagccttttcatggtttgacccagggctagcctcttctgacttcgtgttctgattttctgaattgttctctatctttacaggtcagatcaagaaatccaaacctatactattgcagtgattaatgcgcttttcctgaaggctcctgatgagaggaggcaggtaagttgcatttctttagtcttatggctatgtcaaggctaggaactttgtgtgcagagaacgccctctccttctattcggggactcattgggcctctctgctatcctggccacagatggactctccagagcagctatgttccgctgcacggctggcccgctggggtccttcccaaatccaggggcaagtgggtagagatggataagcccttgactgatgagggatgctaggagtgttccagcagtagagccttttcatgaaatgaaatgcaacctggaagcccagatgtaaaaagatgaaaacgctgctgtggtggaagcagagttaggagcccctgcgaccttctgtcatttcatgggatgctcactaggttgagggaagtgctgttctcattttctgtatcaggaaacagaccctgaggggtgccatgtttttcccaaggaaggaggtgatggaaggtaagaggacaggagggataatatgcagatggctgctccttgtggagataactgcattcgtatgtcagaggggctccttgcttggtgagattacttacttctgtgtgtggatgtggctgggaaattggagccatctgtttcctctcctgtataaaaagagccgggtgcggtggctcacacctgtagtcccagccctttgggaagccaaggtaggcagatcacttgaggtcaggaagctgagactagccttgtcaatatggcaaagccccatctctactaaatatacaaaaattagctgggcatgatagtgcacgcctgtaatcccagctactcaggaggctgaggcaggagaatcacttgaaccaagccgggaggcagaggttgcagtgagctgacatcacactgctgtactccagcttgggcgacagagcaagactatcttaaaaaaaagaaaaaaaaaggaaggaaccccttaatatacatacatggaacctttcctctgatggtgtcctttgtctgtagatcctttatttctttcttcacgaaggaaaggagcattacagaggggatgtgaagaagtggaattttgccttgtcttggaatttaggtcacacctcaaaatccattcatgtttttttcaatcaacatgtcatgtaatatgttaccctggtcacaatttccttccttaaaaaagtgggtgggaatatgagctctttcactcacctagaaactatgctggggagcttgatggcagttgccagtgagttcgtttagaagaaattagaaagcgaacctgctactgaatgctatgacaagaatttttggattttattttgctttttcattgccaaggattttaaacctcagtgactaaacatgaggggttctggtttgttttccatttagaatttcttattcatccctggggggctgtgtttgcacaagtagtggtgtcactttatagtttcctggacgtttgatttggtgttcgctggagccaggtggaggtgcctgccctccacaagcctgtgctaggggcagtcttaccgtggctggatttttaggagtggctttgcagatctgaggtgaaatcatcgatagggctgcttctgtgatattttagtctaaataccgaactcataactcccaagcagcccggaagttgtctggaagctctcaccgtgtacatacccaagcttgacttgggcattggagcaacggggtccttctgctggccagactggggacttctggcccagccacatggtagctgagtgtagcgtgtggggtcaggaaggttgcattctgatctcaactcttggaagtttcctttccccatctgtgaaagaagaggatggattagaggaggtgaaagttcatgcccactctaaaggccatttcacttggatctctgaatctagacatgagtaaaatgcttactgcatcttattttataccaaacactactgttcatttgttaaattggactctcatgaccatggacaaatagggaatcaggtgtcaatctgtactaacttcaggacattgataataatggtaatataatggaatgtcgatataagattaggtttggattttgtgaatcaagtctttctttgaaaactatgcaacataagactgacaggagacagtttggctatatattattctaataaaccaccacaaagagtaataaaccatgacaaagagtagtctaataaccttaaaccatttaagaaaagattccaactaagaaagactgtatataattcagcagaaatttatgaagtattatatgactcattcattcaagctctaaaaaatacctacaaggtatttaatttacttgcccatggaaaagtgatgtggacttcataaactataaactcttgaaattaagaatgttgttcatcaaaataaagggagtatcatgatttttaaatttaaaaaaatttcagtgagtagcgagatagctctaaaaagggatttcagattcataatgaagaaaagtttgttggatattattttctgaaggtcagtagaggcctgtaaagcagaagactgagctaactggtgacatcatgtgggttgctgtggatttatattaacagctgagcttgtatgccttagtctgggctctatgttctaagtaaaataaagtttcagctggtctgaatttgacgttggcattgttattggcgtatgttctgaaaaattaaaagttctgaatttttggcaaataggaaaattgaccaaagtcagccatcaatgataatattattgagagtctggcatgtgccaagcagtgttcagtgttttatattacattatttcattttattctcatattcagagaaagccacattatttctgttttataagtaaggaaattgagcctcaaagggagtaaagaacttgaccaggttactgagcgggtaagaatcagagttcgagtctcaaccttatccctgcttttacctgcaaagcatcccatccaacgcctgtcagagatgtcactcatagaattctcctgtatttgccaagtaaacaactccccgaagcctggatagcaccaagcccattttctcactccaattagattgaaatataatctaaacatgtatttactggatttgcaggaacactattttttgtttgttttttgttgtatctgtttaaagccttagaaccattgctttgtttggagtagcctgattccacttcagtcaaatacttttttaaaatttcatctttttttgacttggggccagacacattcacaggactccattatctggggtttctttgaatttggaatgcttttaaacacttataccttatttctgctgttactgaaaaaaatgccaccatggtcagaaggacctgtgctgttttttcctttgcatctgtgaggtaggccttactgagagaggcctgtgctggggcctagggtaaagcttcctcctctgggaactcccttcccttctagggttcccccaggggtggaggccttgctttcccatgcctctgggatgtaggagattctcagtttcctggcacaaacggagggaagggctgggctagttttgtcggggaggaggttgctgttaggcgggcaaatggatccttttgcttacaacttttaccattattcagttcactatttcaatggcaaatatgttggtgagatcccttccaaatttctctacaaatacttatacttttgataagcactatttaaaaaacttgttagttaaaagatttggtagaaaaatcagaaaatactgactcaaaaggaagaagtttgaaagattcctgtaattatattcccagaggcagaaccacggcaattatttacaactcttgtgactttcatggtgctacttccctgtttgttctgtgcaaatattctcctaatacatcattttttttcaccaaatgtgagcatactacatgcattgtagtttttctaaacttcttttaaaactaaacaatattttgtggacatctttccatgtcagtatatctggattcatatttgtagctatctatacttttacataattttaatgctataaaatattccccatggattctcacatttactccaataattccttactattagaccaaaaaatggaggcatggatatttctattttctctttgaccaagctgctgttccttaggagggtagtataaaatatttatttgttattttatcaaacatttattgtcttctcggtgtcagacattgtactttgggcttggaatacaaaaaagaaaaagacagtttctgctcatgagggactcacagtcttatgcagacaataaatattgtaaacagacaattacaatgatttctttagtagaagttggacatacattgtcccttctaactttaaattttatagactgatagacaaacataggaacagaaatatttttttccgtctttatttatgagcaataatttcatctttttaaaggaaagaaattaaaacagctataggatcctttgaggcttttatttgtcatctggtctaggagaaacaaaaaaaccaccaccagtgggcctttctatgaagatcagcaagaaagccctgctttctatgcctcgtggaagggaaggttccttctgggttaccatttgagttgtttctcaatgcgtcattgctcctgctttcttgttttcaagagtataagacctagtattggatgttgacttgagtgccatctagcttttttgagtcaccttacagtatttaagcacttttcaatgcagtgggtcagcaggggcgttcaaatacagtggtcaacctctaacagagtcctctgaatttccatcccttcttctctcctgcttgctttcctttctgtggtggcgatgacgccgttaggttgatgtagagagcaatgttgacatccttgattgtcctctgactgtaagtcacccacgttccctttgttagcgtaaagtgggccctgctctcctgtgctgctcctgtccacccctgcttgtatgccctcctcagaaatctcccccaccccccatgttcttggttttctttgctttctgcaaatttgttttaaccttagtagaaatcatggttgagtttttaaaccgtggcttagtttcttctctactcagtaagagtagcaacaccaaaaacaccccctaccacaaaacaacggtcaagtgtcttcctgaatatgagcagtatttttactttaaaaggctccaagtgctccaagactatgcttgatatactattttcccttagtctccacttgtcaatatttataaagggactctgtgcatcatttcctttaataaaatcacccttgaatcctccataccagtcaggagatgccaaggcacaaaacaacctgcagaaatcaggccttgcagagctcagtgagtgtagactctagagctttgcatcacccagatatttgcccttcacttaaactccactcagatcacttatgtagcctggtatatgtattactcactctttggttttgcacagattaagatgaaatgacttttagaagatactggaatctccttgctacaggcatgtgttgcctaataaaagctttctgcacgtacgtagtctaataaaagatgatgaggctttctaatagccattgctttgtttggagtgcctgatttttatttagcacccacctttttctggaaggaagaaattcctaaagaaaagaagtttgcaggtgccagatatctttcctttgcttttggacattgcttttacattctaaataaaacagtcaaaaaaataatttgaatactactgcctgtttgagttcattatttcataagaaatactgctgatatacagttacgaagcacaccccaggataaggtcatttttggccatgtcgaaatgtagctttctaacctaagcctttgtgtgggtgtgtttttcttccacaggagatggcgaatattttggctcagaagcaactgcgttccatcattttaacagtgagtacctatgcgctgtgacctctttgtgggggaggagtggcctggtgcatttgttaatctcttcttttggcttcagtctgtggtttgttctgtgacttccttctgtggtgaagcagtaggaactctaatgaaggaaaaagtgagtttttggaattggaataaataaaggctttcccacaggaattgcctcattggattggagggaggggtttctggaactgctctggagagagaaagggggaacgcattctggccggaagggttggatagctctctcagtggggcaggttagggagatcagggcttaaaagattcaccctgatgaggttttgctctttcaatgaggaagctagctgtaaacatatcaggtaccaagagaagtcctgagatgttgaacatcagttttgggggcccgcatgcaagagagaggaaggaaagatatagataggagccactcattcgctgcgatgcaagatgaccttaaaccttggtggaaaaaaaaaaaagccctaagtgtcaccttgcaaatgtttagaaataaaccaaataacaagatttcctgaggccttacccgctatttgacttaccagctacttgaaagaagcaggttgattgattgccctgcttacaaaaaagaaaaaaaaaaaaaggaaaagaggaaaagaaagaaaaagaaaaatctctgtttgcgtgattccaaagagcagttcagcaagcttacagttaaaaacacttggtcctcaaatgcaggttttattattattcaagtatggtgaggccaacagatcaggaggtggctggcattgaaaagtttgttaattatagttccccaaaggagggggcatgccgtgccactgggggattgtcggggcaggggaagctcctgagtcaggaggcaggggaagcccaaggagacctgggcgagagcccttactgtggtttttgagggaagggatatgtgaggccaggtaagctggctgagcaggtttaggattggctagtttgaataatttcagtgggatttggagtttatgggctgtctccagttgtctggtacctggccctgggtggttagggcaggagaacagtggtcctaagagtaggagccagagcttgtagaggagtggggggtgggtgccaaggctctggactgattcatttgcatatgaaaggagtcatttattatctctaggaattggctagacctgggaggagcagtctcttcagggtcaacaaggtcccagatgtcccaacagcagaaacaaatgtctaatacacacacacactatcccccctccctctcccaccaatacaagtaagccatcaaaaattaatgttgaaaataaatgttctagatcccaaagccagtggtaatgccagcaatttgtgaccaagttagttcaattttaaacttcctggctgtcaaagatgacaagaaatgtatgagtgtaactttcattgtttgataaaaagaggtcccccagttcttcgggaaagataaaccttttccctctggaactgaaatctgaaatgaatcttgggagagcatcttaatacattctaggtccaattgtggttttggaagtgcagaagtattcataattactgtccttctttatattggctctcagtaaatgtagaagcagcagcatcaatgggtagctcagtgtcttcatattaccttgatgtgggagtcagggttagaatgccctgagatatgagtggcattaatgactgtgttcaccctgtctcaaaaatcagtttgcttcagtgggacttcttgtatgagatgttgttgatggctgaagttcgaggttggtactctcctgcaagaacttggagtgcagtactttcgagttgctaagaaaagagattcccatacgctttggatactaagtgtgtgctatgagttaacatgcttttctgaggattggaggataaggggtttgatttgctcctaaccatccgttatctagcttccctgcttcccataattttggtttggtgactgtattctctcattcctccctgtcctctttcttctattcctcaatcttctcccacccctcctccttgaattagctatttcagcatggcactgacagctatggtgtggattgcaggtggatgtcaggttgagagtcacccaggcagcactctaaggacctagacttcctccaatcctggaggaagatcatttttctctacaatggggagctttgtcatttactgaacggccacttagaagttggtttgcagcagtctgtctacccaggagcaactacagattgccaagagaattggtctttcagatagcatggcatgagtggggctagcacagttgaaataactgatttgatgggttgttccaccacattgatccattgtttggcatttttaatgtacagtcagaatctctgttgaaaaggctgtatgttagtcccaaatgctgaatgttgagttggtggcagctgtcccatttctgggcaggggtgaggggattgggggtggacctatccagtcttcctgtcctgccactccttgtatgttctcttttcagttctgtttctatggggaaaagtcattttatctttcatttaattgttaacagtgagtaaagtaattcacgagcatttgctctctgcttttgatggtagacatccttgtgtagctcccacagtggattaagatttgatgggtattttgcttttgtgtgttccttctaaaacttttccccattttgaagtgggctcacctgtcagagacagtcccagggtaagataatggcaaaattgcttcctatgggtatgcatcattggtttttctgctgcgtgtgacagatgcttccattgtagaaatccacagttgtcttggagacacccccatttcaagcacatcttctcttgacttatatggctgccatcatcagtccctttccagcgcttttccccttccactccctcctgcccacagtaggttttttcatggcctgtgacctgaagatcaggaaccttactgggctctgaaattcaaaggaaagctctgaaattccctgtgccctcaccttccttctccattccttatacctcccagtgaagactgtgagagccttcttgagtgttaattctagttgtttccttttctttcttttttaaaaaatttcatttgtgaaccatctccctagcatgtcatccgagcccagcgggccatcaacaatgagatggcgcaccagctgtatgttctacaagtgctcacctttaacctcctggaagacaggatgatgaccaaaatggacccccaggaccaggtgagtgctcattggacagcagtcaaagcacaggaaggacagaaagtgtcattaaaagtcttttcttgaggtaccctgaaactagggagtttcagagtttgatatgatgtcattttattatcatctcagaacttaggggcatggcttcaaaattaggtgaatctaggatcagaaaatataccaaatgcattcttccattaggctccaaacatgcatgttctttctgcatttattgaataagaaagtttgatgtcacatgaccacagactttagctcctggccccaagtaacatttaatagtagtagctttggagtcaagttcccagacaactagggcctcttggtgactctatgtggcattgattctgtggggttgagttagcaattttcgttctccagggatcagtgccaagagcagggtcccagattaaacctgatttctgggccagcatttctgtcggttggctgttggctgtaactctctgctgggtctcttgttgtgcatgaaaggttatagctccattcagaaggctttggggacctttgctgtgtgagggtagagtgagaggaaacagctgggagccctgccgtagcacattttcaacttaaacagcgctgcagctttggaaaggaaaacactcattattggcacgtgagggcctgatctgttgcagatgtgaactgcatatgtgaagtgtgtagctgccgtggcacttcattcatggagcaaggccatacggttaagaatgatggagaggctttgagaggcggtgaatgtgccccacgtttttggcaaggtgtggtcatcccagggagaggagactgtcatcttaccacttctagtggcagagagcaatgcctcttaatattgaatgacatgacgctctttgcttggaaacccttttaaaaatttatttatgtattttattgtggtgggatatgtataacagaaagtttactattttaaccattcttaagtgtacagtctagtggcattaagtacattcacattgttaggaaactgtcaccaccatctatctccagaactctttttatcttgcagaactgaaactctgtacccattaaacactaactccccattcccctgtcctcttagtccctggtaaccaccattctagtttctgtctatgaatttgactactccagggacctcatataattgaaattggacaatatgcatatttctgtgtctggtttatttcactcagcataatatcttcaaagctcatccagattgtagcatctactgggattgccctctttcaaagcctggatagtatcccattgtatgtccacaccacattttgttcatccatttacccttggatggacacttgggttgtttgcacctttgaccctttctttcttttttgtcctgtgttggtttccatgaagtaacttagtggggtgaggcactttgggtgcttcttactttgttcccaactgtacagtatccccagtttctctagcttagctttctccaatcacgacccttccatcatatctgggcctctcagttaagactgcactggactatcaatattcgtgctccagataactacttggctaagaggaccactgtggaatacagccaggcctgaccagcagggagactgacgggggaagagtggtctgcaaagccctaacttagaacattggttctcttttatctgtttttcttttgcctgaatgcagtgattcatttagaccccagggaaagagggagtatatgtaatgtcacacaatgaaagcagctttttcccctcccttttctttttactccctgattccttcaggctcagagggacatcatatttgaacttcgaagaattgcttttgatgctgagtctgaacctaacaacagcagtggcagcatggagaaacgcaagtccatgtacacgcgagattataagaagcttgggttcattgtaagtaagctatctccagtatgcgctctccctccagcctccccgggcctgacctcagccacataactgatgtctcttccgagcgtgtggtcctcttgcgctttacggaatagtttccacatttccagatgtttagctggtttaaacaggatcacatgaaaatctcttctggcttcagtgaaatggaataacttgcacaagtgtgactaatactgcatttgtttattcagttctgattaagtgtaaccgagagtagttagcccggaatgtatctcgacttcattaaatctatttcacaagatgcttaagatttgtgtttgccttaaatgagtgatggatcttattattgggttattgagttgattacttacatacatcaattttatatcaaagtcaaattgaaagtctcctgaaatttaatcctgatgacattaacacaatttatgttttcttaaaaggtctctcttgctatgaatgctaataggttgtctcctagattttttttttagtttgcaaatcagaacacagcttgtcctgaatataatccattgttttcatttctgtttgcactatattctcgattttctccccatgaagtctctgagtgaccttcggctaatatcaaattctgcagttgtaaaattggatttcaattttaatccccatcataaatggcattactgagattttggcttcggtgattagaaatcaccaggcattattttatagttccaaatactctttccttggaaaaaaatatataagctatatatctgtatgtgtgtgtctgtgtgtgtatatatataaggtgtatatattttatatatatacatattcatgcatatacatatatacagacacacccaaatatatatatatacacacaatgtatatatctgtatatatactaataataatatttatacatagtttgacaaatggtatcatgctttatgtgttatttgagaaggcttgtctttcatgggaatattctttgaaaatgttttcatattactgtgtttcattactgatttgtttttcattatttagatgtaatacaatttatttaaccaagcccttttactaaatgattcaatgctttgaaattaccataagtctataattaatatcttacagcccagaatgtatgcacacccatgatcacattattaggataaatttgtggaactgtactttgtatgagatatgttttcaaggcttttgatactgtctaattgctttccacacacagaaagtcatgtccattttaaccagcagtgttcattttttttttaactctctccagtagtgtttcttaaactaaaaaaacctaaaaacctaaaaaactaacactctgtccagttattgtttttatagtgttagttttaatatgacgttttaaataagaatacttactgcatattcagctttgcagcttgctttacagaggtattctgaaattatttttgtatcattatattttatgtttcgaccttggcattccattttatcttttagttgaatcaattttttaaaattttagcaaaaaatgtcatgactggtggagcgggtgagtttcctgtacttgtgtgtcgatgaccaaagctccagggtggcagtgaccttgctggcagagcccctctgccagagcgatggtccagggaaggcggatgggactcactttctacctcaccctcaattccaagttttacttttatgtggtaagcaagacatatcgaggtcacttgggaggctttgcgaaatcacccaatctctcttaccctcaagtcatatcaaaattaccaaggaagaatcagggcatgtacatttggaaaatactcttaattgattcctcttctgagggagagcctggttctagggtgctcctgtgactgcaattttatcgtcctcctcctgccagtgcctggatttcttctgagctatgtagaaaatccaaaacctgaattctttccatgtgctgcctccgggatgcatgtgtctctgtcccagtagtgattttcctcgggggcagttggatcccagaatgcacagtatggagggactgtggagagagagaggttgggggccaaccacatggaggagataggattactatagaatctgggtccctgtgagagctatctgtaatgggggtgtgtgctatgaagcatctcctttttattttcagaccctgttcttatgtgagatgaccagggtattccaaaatcagagtacattttctcaatgtagctccatctgtcttaacattcttgttaattccttgtacagtttagtcttggtgtatctctgtcttagttttccctgtctggggagtgttctgcttcatgagtacagaataatagttttttttttttaactgaaagttaattggaggtggttttaaggcctttagcgcttatgaggacttgaaaagtcatcctagaaaaagcaaagactctgaacagagaataatcataagagagtgttggttttctttatttttccatggttcttttttagtttttgattttagttattcccctgcaacttctcccaggccagtcttgcatcagagagttgagaagttggaacgactatttagtaatgattttgagtgctggaaatgatccagtaacttttgacaagcagatattttcacttttgaatacccagccagccagaaatagacaggcctcagtaaacagaaccgcatggtcattgcaccacctagagacggtcttgcaaaaacgctgaaagctggctgatgatatcagggtctggctgcaaaatctctagatgctgtaagcagtctcgtgcagaattctctctgtacttcccaaagaggaatcatcttgcctgttaaactccttactgaactttaaggattaatttgaggtttggatcatcttttggatcactttgaagaaaagttcagttcataagattaagactgctatttctcatgtttctgctcccaagtaggcaatgcccagcaagcattacatgacaaggctttggagttcactgggcctagatttaattttagctttcctccttttgagccatgggccagtggttcagtcatttaacctgtttgggcatgggttttctcagctgtgaaactgggcagcatcttttctgttttgagattatgggagggccccacaggaccgtctaccagcgactagcacagcagctggaaccaaggtgcactcagccagtgctacttccctttcttccttttggagagaacacatcatagaaatcatctgcagccttttaagttttccaaggtaaaagtggccattgcgccaacaaggcaagaagaacagtttattaaaaggtaataaaccacaacacctttgaggaggcagatgggcatcacattccttctcagcacaacatcccaatggagcaaatttttctgataaaataattctaaagtcacaatctaggtggctgagtggcttgtaagtttagtcataacacagaaaagctgcttcatcttctgagatctcgttttttgtttgtttgtttgtttgtttttggtagagttttgctcttgtcgggtgcccaccaccacacccagctaatgtttgtatttttagtagagacgggtttcaccatgttggccaggctggtctcaaactcctgacctcaggtgatccacccacctcggcctctcaaagtgctgggattacaagcatgaggcactacaccagccatcttctaagatctcttgttattgattctgtggtttcaaaatggacaggcctttgtaggtcccctggtgggaagagacagagttgtctgggataatgctattcttttttttgagacagagtctcgctctgtcacccaggctggagtgcagtggtgcaatctttgctcactgtaacctccatctcccaggttcaaggattctcctgcctcagcatcctgaatagctgggactacaggagtgcgccaccacacccagctaattttttgtatttttagtagagacagggtttcgccatgttggccaggctgctctcgaacttctgatctcaggtgaaccacccactttggcctcccaaagtgctgggattacaggcgtgagccaccgtgccctgccgggataatgctatttttagtggagcttctaaggaagggcatatggattcctgagagtaatggaaggcagactctcacctctaggatgactttattttgagaacaggggaaatgctgtatacaaagttgtccctcttgattgtagccgccaagacctgtgcaccatggctttcacactctgcaaagtgttgtgttcctggctagagccctttcagaatttgtctctggtttatttccaatttgtagtctctctatttgtgaatttttccttgttcagtctaccggacaagcatgaaaaaggagatgtctgtagttcatctttctgatcccttctgaatcaaagcagatattaaaatcagacaaggcttttttttttctagctgctttgttttcctttcctttatcttgactgcagagaaaataagctttttttttttaaaaaaagaaattgtttctcaacaatataatgtgttttaacatgaaatattttacaaaaaaatttcatcatatttcaggatcatcctggagggaaaaatgactaaaatgtgaaggtggaagaggttatgggtaatggtgaaaacatttcagaattaagattcatgttcaaatttttaagaggattttctaccttcttgggtgatggaagataattatctgtagttacacaagtataattacacaaaattacatatgcaggggttggtgtcatcttaataatattttttcagcaaatagagatggcagggaatgaaatgaactgcatatttatatttttccttctctatctctgtccccatcctaatactacggaaggaagcgtctttgtctaaatgctactaggcttcaacagtcattgtgagagtaacattgtgattaagcttgggctgtagatttgggttgctgacatcgatttctgactctaccaatcacaggctgagtgacttgggcaaggtacttgacattttcatgtttctgttttttattctttaaaatgagggataataattttctctatcaatatgtgtgttgtgtagattaaattagtagatacttggaagttgttcagagcagtgcttgctacatagtctgtgaatctagatgctattattacgatcttatgattgatattaatattattggaatggcgtccagtgctctgtgacaccgtgagagatggtgatagcagaacgtgagagttgtaggttgtccctaggagggtagtgtgaaaatccgtggtgaaagtaacagttaaaggtgaaagaacactgggtgcttgggaaactgcaggtcatttatcatggccaatgtttatgttgcagagagggaagtagagttgccttttggagtgagggaaaggttatagaagaattttaaattcaaagggctttgcaatatacagtcagtcctcattattcatggattccgtatttgcaaatttgcctttttgctaaaatttatttgtaatgcccaaatcaatattcaacatgcttttttagatcattcttggaaaatgcacagtggcaaaaaatctgagttgcccaactcagatgttccagctgaagtcgaacaagacaccaagccaccaccctgccttcctgtttcagctctcatgcttcaaacaggtgtccctttcccagtctgtctaggccacgtttttctcatttttgtgcttcctgctttctgatggtaatttcagtttcaaatggcccttaaatgtagtgctgaagtgctgtttttatgttccgaagtgtaagaaggctgtgacatgccacgcagaaaaaatacgaaaatatatgggtttgttaagctttgttgtggcagtagttacagcactgttggctgagcattcattgttaacaaatcaacaacatatactaaatagggtgtctttaaacagaaacacacataaaagaaggttatatattcactggttggcaaaagcgttatggtcagaggctcgcagaaacaatttaatattgttcctaggagcaatggttcagtagttgttaacttatttgcagcaactttctaggacataactactgcaaataagaagagtctactatacttggaagtccccagggagcttttgggcagcagtaaactatggagaggagaatcccagagggtcccgtctgtgataagtggggaagagaaagtctgctcttaaatggtaatgagaggtgaagccggctgggcttctgggttgggtggggacttggagaattgtgtgtctagctaaaggattgtaaacgcaccaatcagtactctgtgtctagctaaaggtttgtaaatgcaccaatcagctgtctgtgtctagctaatcaggtaggggacttggagaacttttctgcctagctataggattgtaaacgcaccaatcagcactctgtgtctagctaaaggtttgtaaacacaccagtcagcactctgtgtctagctaatcgggtgggggacttggagaacttttctttctagctaaaggattgtaaatgcaccaatcagtgctctgtgtctagctaaaggtttgtaaatgcaccagtcagcatgctgtcagaacagaccaatcagcactctgtaaaatggaccaatgcgctctctttaaaatggaccaatcggcaggatatgggcggggccaaagaagggaaaaaaaagcaggccacctgcgccagcagcggcaacccctttgggtcgccttccatgctgtggaagctttgttcttttgctctttgcaataaatcttgctgctgctcactctttgggtctgtgccgcctttatgaggtgtaacactcaccgcgaaggtctgcagcttcattcctgaagtcaccgagaccaggaacccaccaggaggaatgaacaactccagacatgccgcctttatgaactgtaacactcaccgcgaaggtctgcagcttcactcttgaagtcagcgagaccacgaacccaccagaaggaagaaactctggacatgtccgaacatcagaaggaacaaactctggacacaccatctttaagaactgtaacactcactgtgagggtccatggcttcattcttgaagtcagcaagaccaagaacccaccaattccagacacattttggccacccagatgggaccatcgcccatcgccaggcggtgagactaatgcctattgccaaatggtgagtaccgtcggaccccttttgcttgctattctgtcctatttttccttagaattcgggggctaaatactgggcacctgttggccagttaaaagcgactagcgtggctgccagactaaagacacacgtgtcaggctttctgggaaagggctctctaacaatccctgactcttcggagttgggagcgttggtttgcctggaaccagcttctgcttttcctgtacttctgggctgagccgagggtcgacagagaggaaagccattcagctctgggatcccaacaacaagttggttgaccctgcagccatgagcagaactctcaaaggcatgtcgtccaagcagactcgcccatctatcctatctattctgacccttgccgcctgggtcctaatgcctgccagacaaacttcctctcgcctctcttctctgaggctagtcccacttctaaaaaaccactccctgtctctggtgcttttctagtttctcctataagaattatttctagtataaactccaggactctgttaccttctttaggtgcccgggctcaccaatcagaaagatgtaatttttgcccaaagccccattgtagggggactatctggaattttaggatccctcctcagacaatcaggcctaacaaaagctattcctgaagctaggatatggtgagcctcagaaattgtatccttcctattcatataagtgaggacaaaagacatcactcttccaactctggagatcccttccctccctcagggtacgaccctccacttcatttttcgggcataacatctttataggacatgggtaaggtcccaatactaacgggagaatgcttaagactctaacaggttttcgagaatgtgtcagtaagggccattaaatacaattttgctcagtcctctttgtggtctaggaggacaggcaagggtccaggttttcgagaatgtgtcaataaaggccactaaatctgaccttcttggtcctccttgtggtctgggaggaaaactagtgtttctgctgctgcatcagtgagtgcaactattctgatcagcagggtccagggaccgttgtgggttcttggggaggggttgtttctgctactgcattagtgagcacaactattccgatcagcagggtccagggacagttgtgggttcttggggagggggagaaacaaaccaaaaccatgggcggttttgtctttcagatggaaaacactgagacatcaacaggctcacccttgaaatacatcctaagccattgggaccaatttgacccacaaaccctgaaaaagaggtggctcatttttttcctgcactatggcctggccccatattctctctctgatggggaaaaatggccacctgagggaagtataaattacagtaagaaggaaaagctaaataatttctacagatcattcagtactgctcagtagtaccatgttggaattcacaggggaagtattataacttactgtgtttcaattcatttattttaaagccagaaactgccttgaaatggctgctataccaaaataccgcatccccaaaacctggtgaattctcagaaaaatcattctaggtgaagagaagccagtctatggtggacttgccttatatttcagcaccgatcccagtgtgattttatcataggctttcatcactaagaatgtggtgcagtctcttggagtacaaggacagcattagtaagaatctagaatacatttatgggaattggagaaattaaattttgacattcacttaatttttgtggtattctctttttgccacagagcatctctggaaagcacaagataatgcaggtttttgtcaatcgaatcacttttccctatatcccttattaataactgggatagtattctgaaacaagtactttgctttcaaatacattttagatttaacccataaacctaaaagtaaaataacagtatatttaaaaacacacatttactgaaatcttatacagttatagctatatagaatgcaggaggtcccggggtgctctgcagggaagctctgccagtcctagccagtccaccagacccagtcagcccctttcacctgaaggatccttgggggacatgggtaaagggattacctgggatggttcaggctgcatgaactcacagagatgtgcctgttcctcagggaccagatcttacactgtcagcctccttgacactttgatcagaccggactctctcttttcctatctgaaatgctgcagacctcagttctaataacttctgaggcatccctggccccaacaagccaggaaattccttagtgaaccagagcagaaatagccaccagatggcgcaaacacacagccattggctctcagccagtcccctgaactctggctgaccagctgctgggacattctgttacgttgcaaccctgcttataagcctgaaacgtttgaagttgtttaaagtttaaaggccaagacaggggttcttggggtctccttagagggctctaaagctttcatcaggacccggtaggaactagaagcattgttggatgtgcaactggcccccctattaaatgggatttgcctgatgttcatggcagatgggctttttcccaggacctgagtctcccaactctcattcccagttatttttccttactctgtcatgaaagtattttaagtagggcaagcaatttttgctttctgctttaacatggaaatataggaaagaatgcactggaaatggaaagtctatgaatgttggctgtaaaaacaataataatgtatttgggggttgaaagtactgtcccattattaaaatatgtgacagtaataacgtgaggagggcagggtagtaaagggagttaaagtgaaccagcattggtggggagttatgcaaagctgtatggggaagtttgatctgactcttgacatgtggttctcaggtaaatagaatcttttagaatcatttttcaattttttaaacagtagccatttctggagctgtatgttcagaggtactgttgagatttctgttttaatggtagggagcattcgagcctcttgagcattcttttctttttatctctaacttttctttcctcactcctaaaaatattaaggggaatttatttttatttgtattttttttttttttattgagacagagtctcactttgtcacccaggctggagtgcagtggtgcgatctcggctcaactgcctcctgggctccagctatcctaccacctcaggaccacaggcgctcaccaccaggcccagctatttttttgtatttgtggtagagacagcatttcaccatgttgcccaggctggtctcaaactcttgagctcaagcgacccacccgccttggcctcccaaggtgcttggattacaggtgtgagccatggcgcctggccataaaggggaattttaaaagggaagagaagcgaaagtgggtggcctatgaagctgctgatgggtcaagcaaaaactgtcagggagtttggttgcacacttcactgattggcaggtgggcatccttttcaggtggcccattcgtcacaggtgaagagaggattgccagcaccctgcctgtacatgttcagggttgcctctgtgctgtctttcttggatgcttttggtcaaatgacagagagaatggcatgcactgtcttcatgtttaattttatatgcagagttgtcttaaagttgtagctgctagttgggcacagtggctctctcctataatttcagcagtttgggaggcagaggagagaggatcacttgaggccaggagttcaagactagcctgggcaataaagtcacactcttgtctctacaaaaaaaaaaaaaaaaattaattagcttggcctggtggcatgcgtctgtagtcccagctgcttgggaggctgaggcaggaggatctcttgagcccagaaggtcaaggctgcagcaagctatgattacatcactgaattccagcctgggcaacagagcgaaaccctatctgtctgtggggggataaaaaacaagttgtagctgcacatgtaggaaagaaaaggttagctttggaaagctctcttgaaaaactgaagaagatcaggtttatttcctgtcattgaaccaagtgaaccaagcacattaagtcatggggcagggcctctgcacagtgggctcttctcagataactcaaggtctcgtggggccatttccacttcagtgtagcatcatcatacttcctaggggtgcagagagatcaagaactcccacttagaatacttgcagatctttcttctgtgatccacctttgctgtcagctgcattgagaaaggacatccaaactggtgcagtggggcccctaaggacagtcctaacacaagctctctgtcactgtctcaggtgaagagttggcccatgttttgctcttgctgcaaggcatgtgctgttgccaccatttccatctgtttggtgactttcgtatgggatatgttactcccttcttcctactccggcatggggagggagcaaggaggagtacttattgctgggagtaatctaatttcagaagcacccatgacctgtggactccttctgaaaaggggatgcatgaataattgtacttttaaaactttgttttgttttgagacagggtcttgttcttttgcccaggctggagtgcagtggcatcatcatggctcactgcaacctccacctcccacctcagcctcccaaaatgctgggattacagatgtgggccaccatgttcagcccgttttcatatttttagaggaactattttaagggaaaaattttaaaaacaaatgacctatgattcattaccatgataatacttgaccttcgttcttcttactttttacggtaattaactttaactccagacacaatttctcagggatggttattgaacaccaggtgaagagacaggtttcttccagtcctgtttttccaaactcctttcctatttagcacgcattgtggtgccttaggagggacatttgtgggcagttagggttgaatctgttctctggtccactagggggcgcgcctatcaaaggcatgtgtgtgagaaactctgcaggctgatggcacttcaataaagagcagctctgatgtgttcatgaagtggaggacttagtggggactcttctaagtgggtaagtttagcaggttcagaaaaatgcttttccagccagaatcttcctccttcccccttttagctcaaaatctccaataactctgtcccctggctgtggcggaaggagaggcaacatattaaacagtgtcaatccttcgtccctgagtgtattgtgcaaacttccttggcatcctttctttgcacatggcgctttggagcaaaagggcaccatccagcaggtgcaagggtgacacatagggaaccaagggcaaagaaacgtcagggtctcgtaatgtataagcaagtcaattgtgtttgaggctaataaaacatagcttttacgagtgcagcctttggtgccagactgcctggttttgcatcccagcttcattgctcattagctgtgtgatcttgaacaatttacctaagtgtttcttgcctcattagtgagttggatatagtcgtatctcccacccaggcttgttatggacattaatgagttaattgatgttaagttctgagaagccttggcatggagccagttttagtaagtttttacaattgatgattgtcatttggatctgatggtggaaatgagtctgcagaatgcatttacagtaacccagatgactggggacattcttcatttgactataaccagctgggtctgagagtagaaatacatggcttcaaaaacagttaattgtcaggagtggcatatcccaaagtccatgaattctagagaatttcgtaagagtgcttagcagtgcaggacttttatacccctcaaagagcctctttagtgaaggaagcggtggattttttgctctgtatttttgctactcaggaattagcatgtaggcacatggccgaggatgtccttatgctgcctgctcttgtgcagattttcaaaagcagataagactcaaaaccacaacatatattaaatcaatattactgtccatgacaggaagcatttttcaattggatgactccatccacgataccctttggagagtgccttggacctaggctggacagtgctaggacagaggaccaccagagtctggcagggctgagtggtgatggggtcctggtacctgggaaaggtagttataggcatccagcacctcttcctctgatgattttctgtaggtgcttgtactcgtgattttgcctctagtaggatcatatcaaagcacccctgagaatcatgctggttattctggggtgcaggcaagagagggaaggaatgaccagttaagagtcctgtgatccagttacctgcttcccattgacctgcttttgatggccatcaatcagctccacgcaaagctagcatgccttctatctttatcctttctcctgagacagtgtgctgttgtggtactttttattttgttttccattttttcaagtggtgactatttgtcacagtgcccttcctacctctgaattcagtgtgatgtgacctcgggagaggaggtgtgagcacgacgtccagactcggacatgtctgtttcacgtctgccgggaagtaatttttatgctgggagctggcttcatggcgtgggattctaattctggggatggcattttgtatgtgtaggaagactgtcaaaacctttccaatgggaagggacaagaaccaatttgagaatcacatggttacataagaactggccctgtgcgggcatctctgcatacttcctgcacttgttcattctgaagacgagagaaagaggagcaggaagaatcttccatgaactctgcaaacctacaaactttccaatgagaagtggtgcacactcccgagatggtgcttgggacaacatggttaaaagggtaaggggtatttattaaccctttgctttcttgttattcctgtccctcctctttaaatgtttacattaccaaactggctagactgctgagaatctatcatttttaggttgcctgctagggtttctactggtcttatcccagtaaatagctgcagaaaatagctgcagtggccacacccagcagcagtagtgtctaggggactctttgggacctgagccagaaagttcccatatgcagtatctcattctgtctccacaagacacaagacacaaggattattatgtctattttagagacgaataaaaagaggcttacagcttcagaagatttgaaacctgcccacaatagctgcagtgtttcagcagcacaaggagacatatgcagacttaatttttgttttcaagttgtttagtcgcaggttcagacactcatgggagcaaggcagtgaaatagatgaaagtagcagatcttagtgaagctttatttctagcctcccatgccaaggacaccccccactcccttggagtccttgagaaagccaccaaatgcttgtctcactgtggcctttccacactcaggatggtattcccactaatgaagaccacacaccaactatccacttgctgcttcttaagggaacatgcacagagcatcgtccttcctgaatctcaagctaaacccagcaggagcaaggccacgtttctatctgggggtagaaagcaaaattgtgcttccagttttccagggatgctataaatccttcgcaaatgctcacagcaagcaagtggcagggccagtgtttggcccctttcaccctgacgccagtcctcccccacctcagcctcgaggctgtgctgtcttgctatttaaggaaaagggaacatgctgtctacaaggtctcagtcgctctttacattcaattcaggtaaatccaagaggccttgtctccattctcagcttattgagcctctgcctgccttcttgatgttgttcatttgttgatgaccttgcttcataaccagggcaaagcagtgagggaaagcaagtattttcatgacaggtcctgagtgctcatcttcctgcttcatgataacccagaaatcggccttcactttttgccttctattgttcatagatggagcctgaagttagcagatttgaatttggttctctccatccccccagccctttaatatatttatctgtgatgtcatatactaaagcttttccttgtttcttgaagggttctccctcattcccactgcagccttccctgtcacttatgagcattagggcaaagggaaagggctggaaaatggagaccaggaagagggaggcctctgcagtacagcttttaaagttcaggggcatctactggaggtggtccgtctgggaccaggtctgttaggagaagagccacgccagctttttcggagaggaaagctctgggaggaggtacagttcttcctcactttgggaaagcatcacagattcctgcaactgctgctcagtgcagggagccccgcctccagccagctgggcatggctgggcatccaaacaggcatccaaggtgtgagacaggggcctgtggatttcttccatctatctgagtggctcactgtagaatggcgtcccatcggtcacctgtagagcactttgatagtaacggatcatgccaggcaatagggtcatgttggagtttaatctagactaaaaataagagactaatgtgttgattcatttgttcgtgcaaccaacatttatgagcatttatgatatttaaggcagtgtgcggacaggcctctctctagtcacaaagatgaatcggagaagccaaggccttcatggaattgattgttgagtgaactccttatcactctggacctcatgtgtgctgttctctctcctggcactctcatcccctgtcctctacaattctcagttcagagctgagtgtgttgtattcttagactagacacagggagcctgctgggagctctcccagtccaggtcctacccccgtttcagcacgtagtttgtacttgcttattagcctgatgtcccaccagagggataggtccttgtctacttagcacacctttgcatctcttgcacccagcacagttcctgccactggataggcatatggtaagtgtgtgttgaatgaatgaatgaatagatcaattaaggattctaccgttcaagaaaggagacacctttacttataggtagaagttgatatatgctatgagaatcatacaaatagactataaagtgtttctgaaattccaaaaatggataaggagaatttatttgaggactccatgagattttacagtggagaggacgctgaagatgaaccttaaagaatagggagcatttggacatgagtgagctggggaggaggaggagcgtgggtgaccaacaaggagtggaaagtggaagaatgtgaagtttccttcaatttctgctcctttgaggctgggccataaaatattatgtgctgcggtgtttggatgatatttgataatttgtaagttaagaaataatgcagttaaagctgaggatttcacttcggtggtagtaaaaagatggcaggaagttggaagaggctggaggtgatattggccgaaactagaaatagaaggggaatagaaagggagaaaacaaatgtgaaagaaaaggtgtggagcacagggcttggtaacagattggatatggggagtgttgcacagcttgtgtggccgggaagctgggttgctctttctgcagataggagatgcagctttgggaaggggctggtttgttccatttaggataaaggacatttgaattactgtcaggacttttcagctggagatagccagaaggccaatggaaatacaaatacctagcacaagttaacatttgcttgagatttacagtaacctggcaagtgttttgttagcctattttaatgaaaggggagctgggaaactatagagcagagaataaactggccaggacatacatcgagtgtgtgacacctgggactccagtcttcatgtgtcaagttctgtgcttgttctggagaatttctccaggagagccagggctttccagagcattctggatgagaagtgccagtgagatgtatttagagggacaagttgctgaggcagcaccgggtgagatcatttgctgaagcctagagtgggttcttctctaagtgtgtactagagtcacatgtttatgtgtatgtacatgtattacatgtgtgtgcacaagtgtgtgtgcatgtgtgtgctcatctgccagcaggagagaaaatggtgataagagaaaactggaaagaggatggcccgccacgcagggactctgatttgtttgtaagagctgggaaacacaattgatactcttcccgtagcaggccattggtgcagtcctattttcgccgtttcctagtgactcacactgtatagatagtgctgccttatttttagtgctgagtatgagtgtgctgcggaaggctgccggttaccaaggaggctgtgcctctaagctcctgcagggagccccccgagtggtgactccagcctccgtgtcactctctgataacccctggcagagcacctccttaacccgaggggtgaccgctctgggctgccttccctccatccctgcttatataacggctttttgttcttattcagtttacgtgttagaaaaaattacctccatcttaaaggagagttctgggaaaatgttaggcagatcatagagagccagggggccttggttggatacaatcactgtgcgggttgggctgcgtagccccacctggtacaggggttttgagtcagcttggcctctttgagcctcccccctcaccaagaatccaggggggaagtggtcaaagtactcaggaagtcctcagaattttttactttacaaggtaatacaaacccagcgaaggggtaattatcaggttgaattcttcagatccctcacaaaaattccatttttgggtctgagcacacatctgcaatgttttgttttgtattttgatttcatgaactttttctttccactctttaaatgtgtgtgtgtatatatatatatatatatatatatatatatatctcctatatatataaaaaatatatatgtatctatatataaattatatataatatataaaatatatgtatctatatataaatatatatcatatataaacatgtatgtatctatatataaatatatatgtcatatatacatatatacacacacacacatttttttttttttttttgagacagagtctcgttttgtcacccaggctggagtgcggtggtgcaatcctggctcactgcaacctctgcctcccaggctcaagctatcctcccaccttagccttctgagtagctgggattacaggaatgcaccaccatgcctggctaatttttgtagtttttgtggagatggggcttctccatgttgcccaggctggctcgaactcctgaccttaagtgagctgcctgccttggcctcccaaattgctggattataggtgtgaaccactgcgcccggcccagtttttttttttttttttgagatggagtcttgctctgttgccaggctggatggagttcagtggcacggtcttggctcactgcaacctcctcctcccgggttcaagcgattctactgcctcagcctcccgagtagctgggactacaggcatgcaccaccacatccagcgaatttttgtatttttagcagagacgggatttcaccatgttgaccaagatggtctcgatctcttgacttcatgatccacctgccttggcctcccaaagtgctgggattacagccatgagcaaccacacctggccctggctctggcccactttttaccagtatttatttctgctaatcaatgtgacacatccctatggtgaaaacttgggagaggaaattgtggaaaacacacacacgagaaatcactcatagtcccaccttccacaggcaaacactgctactgttagcatctttcttcttcttctgtgaactctgtcctttacacagtggagactgacctctatgtttgatttcctaacatttccatgtgtcctcagtacacctggataaacatcacgtgcagaagccagataacattttgtgtgtgtgtgtgtgatggagtcttcctctttcgcccaggcggtagtcactggtgcgatcttggctcactgcaacctccttctcccgggttcatggaattctcctggctcagcctcccgagtagctgggattacaggttcgtgccaccatgcccaggtaatttttgtatttttagcagagacgggttttgaccatgttggccaggatggtcttgatctcctgacctcatgatccacttgccctggcctcccaaagtgctgggattacaggcttgagccaccgtgcccggccgatgccagataacattttattaagtggttgaaccaaaatttatctaaacattctcctatatatttatgattttttttacaagaaggggttccatgaacatatgtgagtaactgtttgtccacattgaggattatttccttagaacagattgttagattcttgggtcggtcaaaatataagaacatttttgacacaattatttttgatatttatttgtaccttctatttttaagtacttccttgtttccatgaggtagatttttgtttgttttttctaactactttgatttagttgggcttaccacagagaattcagaaatgtaggtaatcagaatcatttacataaaaatcagccatatttctatatatgtaaataaaacattgttatagttttgtagttttgatgtatatctttccagatattttctttcttttttttttttttttttgagacagagtcttgctctgttacccaggctggagtgcagtggcgcggtctcggctcactgcaagctccacctcccgagttcatgccattctcctgcctcagcctcctgagtagctgggaccacaggcgcccaccaccacacccggctaattttttgtatttttagtagagatggggtttcaccgtgttagccgggatggtctctatctccttgacctcatgatccacccgcctctgcctcccaaagtgctgggattacaggcttgagccaccgtgcctggcctttccagatattttctatgcttgtataagtaagtatgctttcatgaaaatgtgatcatataggtttttgaaatttttttcaaaatgaatttttaaaagaaaatttctggttgggtgcagtggctcacgcctgtaaacccagcactttgggaggctgatgtgggcagatcacctgaggtcaggagtttgacaccagcctggccaacatggtgaaacttcatctctactaaaaatacaaaagttagccgggcgtgattggcagggtgcccgtaatcccagctactcgagaggctaaggcaggagaatcacttgaaccctggaggcagaggttgcagtgagccaagatcacgctatggcactctagcctgggtgacagagtgagactttgtctctaaataaataaataaaaaagataacatttccatgtgaaaacctagaataggatagtttatgatgtcatcttagtatatgcttagcttcatctgatagaccgtaatgaaagattttctttcttcatgttttaggtacaaaacttagattaaaaaacatatccctgtagaaagcatgttgagacttctctccacattagtctgggattattaaataattattactattaataccatggagatgaacatacatgcaacctgcagaacaaatgaaacgtgttgctctgaagcaaagtaattttttaataattagtagcctatcagcataatgttcattttatgtcttcctaaactttttatcacttgcattgtggtttataaatattgacctactgataaagagcctttgctgctgttctttcgttcagtataagaatttctgctaaatatcatttcttcttccttttttttttttttttggtagggacaaaacgataaaatgtctctagaaatctgatttggcatggtttgtagagagattcatagtccaggattgtttaaccacacagagtcttcagggttttctagaggtttacattctgatgcatccataaaaaccaactgataatgtcattttttagataaaaatgtagtatgatagtattttattcagcattgtggcttgggactgacataggctttataaattatcgtatgatgtggtgaataggtacttgatttgttccacaaaaatctgctgccatttattttatttttttgtttttcaagttttggcaacaacttattatgcaagattccctgaattcttccctggaaatgtgtctctcattcttttgggagatcattgcttaagctaggtaacaatctgatttcacggagagagttagaactcatgtctttgaataaccacagttacatacccatgtagccgcaagagagtgggcttctctccttcccagaggtcttgatgttcattatctctgcccttgggttgccataaacttccctgtgtctttcttcagttatatagcatatgttatatacactcatttttcattagcttcagagttcaagcaaatgtcttctttgcataattcactgggatatccttcggaatgccttacagaaaccagtgtttctcaaaaggattcatttcttccctgctcatgttcacattagaatctccatctgttgatggaggctgaaagtctgattcttctaaggatgtatgttatgcctgcactgtctgtccatcatatacagttttttaattccttttgtcccatggcaatgcagtttgaatctttcatgtacataaacattcaaacatcatgattaaaagtatggtgttccatacacaattaccgaattcttttaaacaatttcttatttttgaatgtatatgttgttaccagtttaaaaattattatatacagtgccacagcaaatacacctacagcttaatcactagaagcacagttccttggttcaggattgggcatattttataacataaatataattcagcaggaggactaaaacagttattgtcaaaaagttaatgaaaatctcaaacacatgaactgagctgcagcaatgatgaaacttgtctttactgcatattctcatagaagctcctcatggaaggctcagtcatggggttgactgtgggggacacatccaggcatttcataccctaaaccccagcaagatttagtggtcgttgggttgtgtttttaaagatttccatgcatattacaaaatattccagaaccagtgacaatttataccattaccattagtcttagaaagtggctgtttctaacgcctaggccgtttcataactctaaagattttcttttatctttactaattttatggttttaaaaaaaactcttaagatgccttttctctaaatacccacagccacatttcctatctccctattatagtcttctcttgctcttagttattattattattattattattattatttttttttttttttttttacctttctccagtggcctgtgtgtgtgtgtgtgtgtgtgtgtgtgtgtgtgtgtgtaacaagaagcacagtctgtatgttaagcactagcccccactttgaataaacactgtaaggtacaacttcatgtaatgaaggatagtggagtaatccagttctgcaaaaacatctcatcagtaagtgtcatttggaacctaaggactggggctctgttttctgcagctcttcttgattggttttggtcaaatcattattttttgaacctcagctaatttatttgcagagtggtgatggtgcttttaaactcctctctttaaaaagttattagagatcaagaagatgtagtgtgtgaagtttgtaatttctgaaccgcggtaaaagtgattatgattgccattgaagacaagattttaatgcacccccacccccctgcttttttttaaactctgtgaatgaagattcttgtcacaaggtaatagaaatgattagacaaaggaaacctactggcattgactaactggagtcctttagatgccccagtttgggctgggatagaaatttctagaaatgggatattcagggagttcccttgaagaatggccttgtgtcgttatttttttaaaaactgtgctgtctcagtcactgtgaattcaagtgcttaacagtttttagtctacacaaaaattagctaaggcaattctttaattgaaatagtccaattatcacatttcagtgcacctgcggccttgtatatacagtaatacagtttactacagtttacctgcatggtcatttttctttactatcagaattcatttggagtagatgactgataataaaaaactggttatagtaatatctatagtaaacaaagttattaaatgctgtacactaaaagcataatatgttattagaagaatggggtgaattgggaagttttatttaatcacttttacaaaatttgtaaaactgagaacataactcatattttaacagttttattgatgtataatttatagaccatataattcactcatctaaaatgtacagtttgggtgcttttagtatgtttacagggttgtaaagccatcaccaaagtcaattttagagcattttcattatcccaacaagacccattagctgtcaccccaatctgttcgtcctccccagccccaggcaaccaattagtctacgttgtctatagatttgtctatcctggatgtttcatataaatgaaatcatacaatacatagtcttttgttactggcttctttcacttagcatggtgttttcaagtttcatctatgtagtctcatgtatccgttctttgtttcttcttattgtctgattttattctctcatacacacacatcccacattttatttatctgtttatcagttgatgagcatttgggttgtttctagttttagttatgatgactaaagctgctatgaacacttctgtataagtttttgtgtgggtgtatgtttgcatttctctttgttctgtacttaaaagcacactgattgtatcacatactgactctatgtttaaccatttgaggaaatgccagacttttccaaagtgcttgcaccaatgtatatgctcaccagtagcttatgaagatttcagtgttttcaggtcctcatcaacacttgttattatctgactttttgctgatgggagggaatgggagggaagtggtatctcattgtggtattgagttgcatttaccagatggctaataatatttgagcatcttttcttgtgcttattggtcatttttataacttctttggggaaatgtctgttcagatcctttgcttgtttgttaattgggctgttcatcttttaatcattgagttgtaatagttctgtatgttctagatacaagtccttatcagacatgatttgcaacttctcacattctgtggattgccttcccactttcttgagagtgtcttttgaagcgtgaaagtttttaaatttgatttttattttgatatatatctagtttgttttttatttttattgcttatgcctttggtgtcataactaagaaatcattgttcaattccaggtcatgaagatgtatacctacattttcttctaatagttttataattttcacccttatatttagttctttgatccattttgagttaattgtgtatggcataaggaaggggtccaacttcatttttgcatgtggatatctagttttcctagcattatttgctgaaaactgttctctcttcattgaattttcttgacacttttgtcaaaaatcaattgactataaatgtgaaggcttatttctggattcttaatcctgttccattgctatatgtttattcttatgtcaagtccacgctgtcttgattatggaaactttgtagtaagttttgaaatcagaaagtgtgtgtcctccaaatttgttagttttcaagattattttggctatggagggtgtcttgaatttccacatgaatttcaggattgtcttgttgatttctacgcagaagtcagcggagttactgatagggattgtattgaatctgtagatcaatttaggaggagcattgccatcccagcttaacaagataaagccttctaattcatgaacatgggatacccattgatttatttaggtcatctttaatttctttctacagtgttgtgtagcagttttcagaatataaattttgtactttatcttttaaatttattcctatttcattcttttgtatgctattataagtagacctatataaatgatccctaagaagagtacttcaaattttctggatcaaaaatcttgtctggcttgagccacgtaaccatgttggcacaatcagtcacatctagggttatgtggtccttccacgttatatatatggtatgtatatatatacagtgctgtttctccaacaaaagcttgaatctagggtgatctgagtgggtttaccatgcccactacaagcccctgcccagaaagtggacctttgtttggaactcagttatcacataaatactcatttattattttttcaggactattcatttactttatgaaaattaaaatacaatgttatttttaacaagtagtaaatggaaagaatgagtaatattaaagctttcatttctataaatgatactacttagacctccctattaaatattctgggctcagtatcaaattctattgtaatatctttgaaaagcatagaagcagtttctaatttaaaactctagctagctgctgctctgctaagaataaagattgaccacaaattcaacttaatctgtcgatcctttgcatttaggctatcatatttgattcagaataactccgctctttaagacagtttttaatgacgtgatgagagaggaaatgcaaaatattttacattagcctatactctatttgtccgtctagttataatagacagactcattataaattatgacttcctatttcatagatatgaagattagtcaaatatgtagaacaagagaaaaaaggatagcaatgaagtaattcgtgatggacttttttttttcttttgagacggggtctcactttttgtcccagctggcgtgcagtggcatgatcatggcttactgcagactcaccttcctggggtcaagtgatcctcccacctcagcctcctgagtaacatgccaccacaccagggctaatttttgtcttttttggggggtagagatggggttttgctatattacccaggccaatctcaaactcccaggctcaagtgatctgcccacctctgccttccaaagtgctaggattataggtgtgagccatcatgccatgacggacttcataaacatagtaaaaggtttcagccaaagcagtttgatttaaatggatgttttaatccttggcttgcaataattttatcctctggaaagtatggcttttcagtcaacatattcatttttggccttgaccgtgtagagcaattacaggagcccatatcaacaagtgtcttcagttgttgcattagtgcctggagccagaacacaaaggtagccagagagggtgcccctaaaccgtgtctccccacatctctgactctgaaccacacatgcatggagcctactcaaagcaacctagctatggacagaagatctcactaagaccagacttgtagccctggaaacagtttgcagtttgtgcacagacaagagaactatctgctaaaacaaaggaagcaacactcattggagaaaaaacagaatccagaatcttcaccacctaacattcataatatctggaaaagaatccaaaattcccagatcatggagaatgaggacaaaagaaaatcaactccagctctcagatgaaccagatgttgaaactaacagacaaaaggttcaaaacgactgtgataactatccccaatgagaaaaacaaaccatgttttcaatgaatgagaatcttagcagagaaattagaggtgttggtagagaaatggaaaacagtaggaagcaaccaaatggaaattctagaaacaaaaaataaaatttctgaagttgtatgtaacaatatataatagatcttttataaatgtaagctattattattatataagggtaaagataaggtattttgcctttattttattatacgtttaccagtgaagtcgaagcagataggacaattctatccaccttttcatcttctaaaccttattctctttggccttgagaaaaaaaaaagtctggaatatacttagtgaagtgagaaagttgagggaggtgggggacatagactatggcccttccctctttcctgctacttctgtcctgctgtgagcacatctgtgctgttgtgctttatagagaaaattccagtttacctccctatttctctctctcctcttctgggtcctgagtaacaggaggtcagcttttctaggcctttcttatctcttcccctgataaaagttggattcatgtgtagtgcacgaacaaataaagctttggggctctggttccctcctcttctccccctgcctcttcctcctcattgtcacatccttattgtaaatactttaggggcagtgtataaaaaatggcactaattactgaaacaatgttatttaccacatacactggcagaatgtttactatgtttctttacagccggggtttatttttgtttgatgtatttagttgctgtgaaaatgaacgtgttgctcactctcgatagacctgttcttcctcctccttcctccttctccttctgtgccagatcgtcctcctcttcagcagcttctcttccttcattaggccttctgggcagtttttaggatgtctgctcctaaactatttccatttaaaattgttctagtgtatcaacacaccaatcactttgactccatgcaagctggtctctgcatttcaaacctagcttccgtgtgttagtcctttttgacatttttatagggtttctccaggaaaaaaaagaagagcatagcaaaggtatgagccatccttatggagtgccagcctagagggaaagaggaactaaacattgtttgtatacttaccacctatgagggcccctccaccatgtttgacacactcttcttgcagctaactggtgaaatagatgttttgtccctggttttatatctaaaaatactatactgaggttaagtaacctgcccagagtctcacacggggtaagaagggacaccagaattcagtgataattgtatcattcccaagcctcttggctttttaaatttatttactctaaaccatactgcacctctctaagtaaaaggttaagagaactcaggaatgcaaatgaaaaagcgcttgtcaagggagagagaagagagagaggagggggagggagagagagagagaaagagagaaagaaggagagcgagaccgatcgtgccattgcactccagcgtgggcaaccaagcgagactccgtctcaaaaaaaaaaaaaaaaaaaaaaagtagagagagcacaagagcactcatgatcttcctatgttgtcatttttagcctttttccaccttatatgtgctgagagctgttctgctgccattttctctccctgcctcaagagcacatttaagtgcaagtgaatggggtgggattgtgattgttacactgagtgattgcttagaatctgccctaccgtatctgccggtgtataaaactctaccgatgttaccaaactctgagaggatgtgaagctctagttttcactgtgctgagctgattacctcatgtcgtcaccagggggcagcaccttcccatgcctttggacttaggagcctcggggcggtgggaagcccacaccaaaccccatgccttagctggtcacctcttaccttccaagcctgatccaagtttgggcaaaacggatgtaaatgtgtttttaatttttttttttcttatttgagaggggggcaattggagggaggaaatacagcttatatgttggcatacacatttgaaatatttggtactttctaagcaggagttttatgtgtattctgtgttcttttctctactgagaaagtaactatttcctttgctagggatgcagtaatcagcaatgcctgttgcaaccataagttacaccatattttctcaaagaaacatggtagtaatcagaggccattgttcaaagtactgactttagtcagctgacctgcaatcaaacctcagtttaggcacttactagctgtgtgaccctgggcaaaatacttaacctctctgagcatcacatactcatctgtgatatgaggactgcaatacattcctgctttctttttttgacaaatatttattgagaatttctttacttgtggaatgtggtattatgtcctgtgtttaatggtctttatatgtatctcccagttcagtttcatataaattggcctcttgtttctgtaactaggattgcatttctgtcaaaagtcttggcttatacaaggacgctcaaaggccatccaatctgcaaatacaagacagagctgcctcaggaaatgcccgatgatttaattaaaatgtgaagagtagcccacagagagggcaggtgtggtgtaaccccaccctgcagggatgaggcgggcatcctccttctcggtgacttagcctggagtactaccttggagtagtttcagagacggttctcaggacaaaaagttgacccctgttttagggaggctgccttgtggccactgggcatgctgatggtttgccatctaacactttatgcctctcacttgtccccattttgagtccaggcaactgtgacccctggaattatggagagtctcttgggactgtcgttattatttttattcttactgaggtaaaattcacataacataaaattaagcatgttaaagtagacatttcatttagtacatttataatattgcacaatcacccactatctagttccaaaaatcatttttttgagtttctattttgatatgattttaacctaggaaaaaaattacaagaattgtacaaggaactctgcataaccttccaccagatatattcactgttgatgttttgcctcatttcctccctggtgtttgctttctctctttctctgtttgcgtgtgcatgtgtgtgtgtgtgtgtgtgtgtgcatatgtgtgtgcatatgtgcatatgtgtgtgtgtatatatacatatttttccccaaaaaaacactttagagcatgctggagacattgtgtccctttagcactaaatacttagtaggtacgtatttgctaatatggccctattgtacaattataaaaacctgaaaatgtaacattcatacaattctattgtctaatccacagtcatgactcaaaattcatcaaattttctttacacttattctttcctagacgaggatgcagtcctccatcctgtgcggatttagctgtctttctttttgctctcctttgatctggaatagtgctttgcctttctgtgtgttctttgaccttgacatttctaggagaatacagaccatggttttgtgcatcatctctctcaatttggatttggctaatgcttttcatgattagattcaagttcttatatatcatctccctcccaagggaaaatgggtcctgatttccacatgctaaacttaggagcattgattatcctattacccctacaaaaaccagtgatggcgcggagacggcatttttcagccttacattgtaaagctgtcccaattctgtgggctatagtgatatgagggtcagtttcctgaagaccatggaaaatctgctgctattcctttagttttgggcatcatagaatgggaggtttatggcttcaagactggaagatggtgatgcagaagcacattgtgcagccctttgggttaaaaatcattctttcatattgtgtggcaaaatggaatttgctttatgttcattcacttgtcagatgctgagtgagaaaatgacaatttacaatgtaaattcttaagataattaagtcagtcttctatggcatggtgaaaaattccccaggctgcctactgggctcctgcacactttgcctagaaggatgaattcttctctttacctcgctgtgtaacttccctctgccaagcaaaagcacctcgctaccttgagaataaattgacaatctcaattttgatatgttgctgatttcttttgtgtacatgattattaatgtacagcttatcttagcagcagatccaaggaagtgattctttctttctactgtttccatgtagccagccttgcccaagtctttgttcctctttccccattcacatgtatttgataattcagcttttcctaaaatattttgccttttgtttttaaagttgaaagagctatatgcaaggccgggctcggtggctcacgcctgtaatcccagcactttgggaggccgaggcaggcggatcacaaggtcaggaggtcgagaccagcctgggcaacatagtgaaatcctgtctctactaaaaatacaaaaaattagccggtcgtggtggcgggcccctgtaatcacagatactcgggaggctgaggtgggagaatcacttgaaccctggaggcggaggttgcagtgagccaagatcgcgccagtgcactccagcctgggtgacagtgtgagactccgtctcaaaaaaaaaaaaaaaagagctatatgcaaacattcagattaaatttggattacttttaagccacatgaacaaaattcccctcgccagtctgttccctctaagaaaaaaattatctgttgcctttttttcttaagctatctatttggaaataatttggggttgactgaactgtcgcagccatagtacagagtgttaccctgttccctttacctagcttccggcaatgctaatatcatacacattatgtcttacacaaagtatatttatcaaaaccaaatattaacagtgtgtgatcctgttaaccaaacagcagagtgttttaggatttcaccaggtttttccctgatgtccttttctttcctcagatcccaggtagcatttagttatagtctcattcaacctgcgacagcttctcagtctttccttatttttaatggccttgatatttcctagcaagtctggtcatgtgttttgtagactgttcttcagtttgggtttgtctcatatttctcatgattagactggggttataggtttttggagagaaacttacagaggcaaggtgccttgccacctcgtatgaggaggtacgtctctcctgacttttacaatttttattctctactattgtgtggttttaaatatctttctatggtgctaatactgtttttttttctaattaaaaaaatttttttgagacagggtctggctttgttgcccaggctggagtgcagtggtgtgatctcagcttactgcaacctctgcctcctgggctcaggcgatcctcccacctcagcctcctgagtagctgggactacaggcgccaccatgcctggctaattttttctttttttttttttgaagagatggggaattgtagctcccatgactcccgtgtgttgtgggaacaactcagtgggagataattgaatcgtgggggcagtttctcccatgctattctcgtggtagtgaataagtcttacaagatctgatggttttgtaagacgtttcccctttgcttggttcttattctctccttgcctgttgtagtgtaagacatgcctttgaccttccgccatgattgtgaggcctccccagccacgtggcactgtgagtccattaaacctctttttctttatgaattacccagtctcgggtatgtctttatcagcagcatgaaaacggactaacatactgctaatccctcccagaaacacactcacagacacaccgagataatgcttcaccagctatctgggtgttccttggcccaggcaagttgacatgtacaattaaccatcacaggaagttccccagtgcctaactccctcctgaatcatgcattggctgtcttgagtttgggggaggggcatttatttggtttgatggatctgtggatattttagaaagctgatttcaatctataaagtaaacctccccttcaaatacaaagagtaacatagatacagattttatctaatttcccttcactgatgacctctctaggtcccagtatataccacatagtaagcagtgagtcaaggaaaagaagggccagagtaatccacaaaccttaatcaatccatgaccacccagcagctggagcaatcactctctagctttctctcattaggtacacactaaattagaaatctttaagtagtgtcctcttgaacacagagtgacaggaatgaaatgcgacacataacagaggaaaacaaatacaaatagttttcaaaataaagtcagtctttagaaggaaggtcacttttgtttatttcctaagatttaattcaaattattctcagaatacattttaaattattgtgctgtaacttgaatattactaattactatgcttccaattggggaaaacaaagaaatttaattagctctgaagtttgagaactattgaaagaagcactattcccatgccacttctttgtactttcttgtgctcatgatgtttttaattgctagtatattttgctttatgtgtgaatgtgtttggcaaccattgacacagagtggagtatcatgagttttacaagccactcatagcagaaagttttcttgacagggcacagaaaatgaaatctcagatttgctttatctgacaatcttctgctagaacatgctatgtttagagttctcattctgagagtgtctaattggaaaggtggtcttctttaattccttgaagctcttaatttcagttccactggaaactcttcttcccaccttttatctagtttgtaacatacaatgtccatttctgctgggtcacttttcccactggaagatacatctacagtccttcctaagcatttttaatggctacaccatatccgtacttaggcattgagctgtgtcttccatattggtctatgccagtattgtctgacgttgattacatagtcgtctaaaagctataactgtgttttccttttcccttctttactttgtcttctaacttttgtttactgcaaccaatatcagcataaaagtaatagagaaataaaagaaaatgtgttccatgtttccatgacagtgcatccgttagttatttttgttttctgtttgcttccagtttttggtcattttgtaaatggtcaaataattgtaataggagggaaaagattattctatgttttacttgaagcattatctcacaagcactttttcatattgttataccacaattacttttatggctgttcattccattgggttgatgcattgtatatattttgatatttttaagtactggacattcaatgttctagtatttttgtaagcaatattatattgtacatttttattcttacagctttctgtttccttttcagttatctcactgcgatagaccaaaatatttggagactttcatggtcgttaggctatatgttgctttttgttttgttttatttgtgactatttttagcacattgtcatttataagaaagtactttgtcaatgcatagggaggaggtgacaataaggaagcagtccttttctttgaaagtattgttaggattctgaggaagcttttctaggaaatgacagtgaaagtataacagtcgatgagtctttggggagcttgggaaattgttgagatgttaaaggtcattctgaaattaatttgcctagcccattgtaggctatactgaaattattatctctagtaaatgacagcatattctcagctatatccaaagactgttgtagaaccagccacgatctcctgtatatcattccaaacatcacttgaaagttctttcttgtgtctaatctgaatcctatgctgctgtgaaaatcattttcaggtattgcagttcaacttggaactaaaagtaactatgttcttatacactgagaacagagacactgtccattctaaagtgatcatgagtcgtttgttggttttgttttgttttgttttttctttgagacagaatctcactctgtcgcccaggctggagtgcagtggtacaatctcggctcactgcaacctccgcctcctgggttcaagtgattctggtgcctcagcctcccgagtagctgggattacaggcgtgcaccaccacgcccagctaattttttgtatgtttagtagagacaaggtttcaccatgtttcccaggctggtctcgaactcctgagctcaggcaatctgcctgccttggcctcccaaagtgctaggattacaggcatgagccacagtgcccagcctgttgggttttgagttgggcatggggaagagtgaaagccaagtgtccccagagggttaagaaacctgttggaaggtgaccctgggtgtaactccatggtgggccgcccgtctcaactgctgtttggtttcagctgtcctaaggggaggactgactctgcagcctgacaatactttctgtgatgtgttactattggcatgccgttccaactggacattgaaaatttgcagacaaatgtagagatttggtagtgactaatttgcattgcacaaggtgttggtagtagtgaacagcttgctatgaagcccgtattcaaaatttggaaggaacaaacactatggatatgctcatctcaccaaactacccaacctatttttctttcactccttttctttgtctccttattattctgctgatcattttctctttgcagtgtttcaaatgctgtttctcttttcttttcccgccttccttttttcccttccactccttttttctatatcacctttctctctgccccctccactttatctcgggtcccacttcgccattgattttttaccattcttaacccctttcctcttttattgagaaaataggctttaaatttggagtgtgctaagaaaatgtcgctttatgctgaaaaactgcaggattcagggactgcatttgtggtgtggcttattgatagaagagaggctatgaaagctagtgcttacaagtgatttaaaggtgacggctcagtgtctcaggtggacgtgattatattgtgggacagctgggttccattttagcttgatattgacctctccttgccatgtaattaacagtgtgccagccacagatcataaagtgagtgccgttcaatgaataacatcatgtactggtgcctggagtttgttgtacccatgggacctagtgggcacggggcatgcctggatatctagccaggagtgacacttaagctcaattgctggatgctggattacaagagctctgacatgcatcctcagatagcccgctcgatacagatggctgatgagttctgaagcttcatgctgatgtgtccaggagcccaggggcaaactgaccctttcctctttaggcacaatgcctgcgtcggctgtttagaaatcatcagaaaacattttaatcttagggggctcgatttttggtgattaaactagacccctaaatagagttctctaaaccccaaacacaatgaacagagattcatagtgaagtaggtttgcctccgtgaatgagtgttgcagtgaatctcgtccttttcttggctttggtgttgtgtagtgattaacaaaaacgtgagatgaccgctgggcatctttataggaaaaaggaagtgggagggtattaagcatagaatggatgctctcatttgcttgagatgtgtaaaataagttggggtagaatggggaagggcagaagactaaagatttaagccccccagtcatggtttcatttaatacgttaaggaatttgatgaggtaattgggcagattcaaggcaaagagagagcagggctgagtatcagtgatcttcagataatcactaaggtattattcaggacacaagccagatgacgttagcttcaccagaagatgggctgatgtggccatggattcagttagtaattcttggaattgctggggcttggggcagccatcaccatgtggtttatctttgtctaacctcactaaagccagccgagcagacactgtctgtttggggctttcaggtttggggtggtggttctcagtagaggctgaagaggaaagagagaccttttaaaaagaaaatatttcttttctcttctctatataagttttgagcttaacaggctttgatcaagaagaatttcaccttgggtttctgttttgagttacatctcctcaagacgctgccatggggctggaggagaaggtcagagagagggaaaacttggactgtgctgaaaccccttcaggctcacttatttagttattcactcagaaacagcagcatggactaggagctatctgtgcttttgcaatgtagcttcactacttaatttgaaataaattcccttataataggtccaatgtataatccgaggcagatttgaaataacattcaaagagtttttggccatctactccattgcttccttccatcagtggggatctctgtgacgtggcttgtactccctcaatggtcctttttcttggaacctcacatggtcactttgggccagaagatggtatagcatgaataagaagaggtggcctgcagtcctaggtgctggtccatactggccaggacagagaatacgggatatcacatagtctctaaatacaatttcaaagagtgcatctctagagttaagtgagtttgccttaaattctgtgcagttgcagatgatgtaatccatttataaacattttattaggcagattaaattaagatacaggaaatgctatttcacatttcgttgaagaggaaagtcaagtcttgtgaacgttgtttactataacagaaggttcttacatatccatctcaactcaattttcttattgtttcaggatccgagttccctgctgacttctactccttgcacagtaaaaagtcaatctgctaggagcttgctgagatgagtaagagccgtctgctagttaagggaaatttggactcaatgaaaatagtcaatggaaacctctgtttgctgtatcaagcatgcagtacttatacccgtacatggaacaaatttttttttagcttcaatgttgtaaggaagatagcaattttccttctcagcgtaacatataaatgtactacttggaaatcgagtagttggcttgagttctatttctggtattgtcggcaatgtacttgcctaagacaagccctttgaccactatctatagactctaatatcctaatcaaggttattagtaccttctgatagtagcttagctcctccatttacagcaaatcttactttttctgcattcagctgatgaagtctatgaaagaatagcaggaataataagctagttttggtgttttggccttttggataggaatgcagggaggaaatgaaatgaaggatgtcttgaaatgtctcacttagactttcttatgttcagagaaatacagagagaacatttcctagatattgagggtaaatttctcttcttgaactatcttaagtgcctcagaagaggacttcagtttgagatgactttttttttttttaatgtaagcacagacaattctctctccaccctcaaccctttacacaatttctgagaacagcgattttcaacgaaggggaggaacagaaatgaagttgacaagagaagccatctaaaattaaaactctccatatggaattgctttttcttttcctccagagagtgtactcactctaagtcagctctgtctttgaacattttcttacaggatagtcattggaggctctgataactcctagcttctattattgtccagcttgtatcttttaaatgtcaaaactatgttcttccaaatgacaaatttttatttttaaaatatttttactaactttacttgtatgttgaacagataatagtacaaaattcaaaaacaaaagacccaacttggtgaattttgttgatttttagtctttggattgaatctgatggtgtttagaagttgatggggtataagtagctctctaagctagatcctttattgcttcccatcagtctaaaatgtattagaagagaaaggcggccaggcgtggtggctcacgcctgtaatcccagcactttgggaggccgaggtgggcagatcacgaggtcaggagatcgagaccatcctggctaacatggtgaaaccccgtctccactaaaaatacaaaaaattagctgggcatggtggtgggcgcctgtagacccagctactcgggatgctgaggcaggagaatggcatgaatctgggaggctcagcttgcagtgagccgagattgtgccactgcactccagcctgggtgacagagcgagactctgtctcaaaaaaaaaaaaaaaaaaaaaaaaaaaaagaaaggcctggttacaagaataaactaatggataatttttagctaatagcaagtttacctagaaatcagatatttaaatactgctgctgtatctatatttttatgtccatattttattgcccatgacgccactgattggtagatacacattttatgtacaactgagaaaaagaaacctagccagttaaactatttcccagcacctcctgttatttaaatgatctcttaggaaggaattgagtgtatctaatatatttttaaaatatatttattgaaagaactcttctggacttaacgatatataggcatttatcatttaacagtcttataaacatataaaaaatacaagaaaaatacatcaggtaagttttactcctgaaacttctgtacaagaaagtttaagtcttctgaatcactttcaactcaagacttcagtgtctctattttgccacgcaatttgccctttgtgctataaagaatattggtgaaatagttttaaaagaatttttttgtttattttgcattaacatcttctacaaagtttctgggaaaaataaatttataaaatgaaagttcagccaggcatggtgcccacacctgtaatcccagcactttggcaggccaaggtgggtagatcacttgaggccatgagtttgagactagtctgtccaacatgttgaaaccccgtctctactaaaaatataaaaattagcccagcaaggtggcacatgcctgtaatcccagctacttgcgaggctgaggcacaagaatcgcttgaacctgggaggcagagacagtgagctgagacagcgctgctgtactcctgcctgggtgacagagtgagactctgacaaaaaaaaaaaaaagcaagcaaggaaggagaaagagagagagaaagaaaaagaaaaagaaggaaataaaagagtaagttagttcactaatgctgagttcttaagctgtttaccactgcaattttgtcatgttaacacaattctgactgttgctgggctggaaatgtagaggaacagatcccagcacttccaaccaccatttggtgcctagggttagtaactgctctggtatatctcagggttttcattacagttgctgagacccattctgctaattcaattcaatgctgaatttttaaatattcacacatgaaaattgctttgcgactgctgtccatctgactgcaattgaaagatgccattcattgtgaaattctacccaaatttagaattggaaatagacgaaaagaaatgtgcatctgcgccaggcgcggtggctcacgcctgtaatcccagcactttgggaggccgaggtgagtggatcacctgaggtcaggagtttgagaccagcctggccaacatggtgaaaccctgtctttactaaaaatacaaaaaaaattagctgggcatggtggcgtgtgcttataatcgcagctactcgggaggctgaggcgggagaatcgcttgaacccaggaggtggaggttgcagtgagcagagatcctgccattgcactccagcctgggtgacaagagtgagactgtctcaaaaaaaaaagaaatgtgcattttagagttaatgaaagataatgattaaatataatttctagaatttttagtgtttcagatgagaattgtggacgttcactgtgctcgtaagccaaaatgccaagtcaaaagcaaaagctcttcctgttggttcctaagtgtgatgattgggttttcacattcatgtgtgacatgtgcctccctcaaatcttgtgatgatgtcggcacgtgacccatctgacgtgggaaaaaaagtgaaaatgtaaaaagaaaaagcaaaagcttgaaattttgaaatgtcttaatttcttagcgtgattatccccttcgttagaatgctcgcaaatcttaacaatacatttttttcaggacatctaaagtgactcaatttgaacatttgaagtggcaggttaaaaaaattttttcccagggaggagccaagatggccgaataggaacagctctggtctacagctcccagcgtgagcgacgcagaagacgggtgatttctgcatttccatctgaggtaccgggttcatctcactagggagtgccagacagtgggcgcaggtcattgggtgcagtgcacgatgcacgagccgaagcagggcgaggcattgcctcactcgggaagtgcaaggggtcagggagttccctttcctagtcaaagaaaggggtgacagacggcacctggaaaatcgggtcattcccacccgaatactgcgcttttccaacaggcttaaaaaacggcgcaccaggagattatatcccgcacctggctcggagggtcctacacccacggagtcttgctgattgctagcacagcagtctgagatcaaactgcaagtcggcagcgaggctgggggaggggtgcccgccattgcccaggcttgcttaggtaaacaaagcagccgggaagctcgaactgggtggagcccaccacagctccaggaggcctgcctgcctctgtaggctccacctctggggacagggcacagacaaacaaaaagacagcggtaacctctgcagacttaaatgtccctgcgtgacagctttcaagagagcagtggttctcccagcacgcagctggagatctgagaatgggcagactgcctcctcaagtgggtccctgacccctgaaccctgagcagcctaactgggaggcaccccccagtaggggcagactgacacttcacacggcagggtactcctctgagacaaaacttccagaggaacgattagacagcagcattcacggttcacgaaaaaccgctgttctgcaaacaccgctgctgatacccaggcaaacagggtctggagtggacctctagcaaactccaacagacctgcaactgagggtcctgtctgttagaaggaaaactaacaaacagaaaggacatccacaccaaaaacccatctgtacatcaccatcatcaaagaccaaaagtagataaaaccacaaagatggggaaaaaacagagcagaaaaactggaaactctaaaaagcagagcacctctgtctcctccaaaggaacacagttcctcaccagcaatggaacaaagctggacggagaatgactttgacaagttcagagaagaaggcttcagacgatcaaactatgagctacaggaggaaattcaaaccaaaggcaaagaagttaaaaactttgaaaaaaatttagacgaatgtataactagaataaccaatacagagaagtacttaaaggagctgatggagctgaaagccaaggtttgagaactacgtgaagaatgcagaagcctcaggagccaatgcgatcaactggaagaaagggtatcagcgatggaagatgaaatgaatgaaatgaagcgagaagggaagtttagagaaaaaagaataaaaagaaatgaacaaagcctccaagaaatatgggactatgtgaaaagaccaaatctacgtctgattggtgtacctgaaagtgacggggagaatggaaccaagttggaaaacactctacaggatattatccaggagaacttccccaatctagcaaggcaggccaacattcagattcaggaaatacagagaacgccacaaagatactcctcgagaagagcaactccaagacacataattgtcagattcaccaaagttgaaatgaaggaaaaaatgttaagggcagccagagagaaacgtcgggttacccacaaagggaagcccatcagactaacagctgatctctcggcagaaactctacaagccagaagagagtgggagccaatattcaacattcttaaagaaaagaattttcaacccagaatttcatatccagccaaactaagcttcataagtgaaggagaaataaaatactttacagacaagcaaatgctgagagattttgtcaccaccaggcctgccctaaaagagctcctgaaggaagcactaaacatggaaaggaacaaccggtaccagccactgcaaaatcatgccaaaatgtaaagaccattgagactaggaagaaactgcatcaactaacgagcaaaataaccagctaacatcataatgacaggatcaaattcacacataacactattaactttaaatgtaaatggacgaaatgcttcaattaaacgacacagattggcaaattggataaagagtcaagacccatcagtgtgctgtattcaggaaacccatctcacatgcagagacacacataggctcaaaataaagggatggaggaagatctaccaagcaaatggaaaacaaaaaaaggcaggggtttgaatcctagtctctgataaaacagactttaaagcaacaaagatcaaaagagaaaaagaaggccattacataatgataaagggatcaattcaacaagaagagctaactatcctaaatatatatgcacccaatacaggagcacccagattcataaagcaactcctgagtgacctacaaagagacttagactcccacacattaataatgggagactttaacaccccactgtcaacattagacagatcgacgagatagaaagttaacaaggatatccaggaattgaactcagctctccaccaagcagacctaatagacatctacagaactctcctccccaaatcaatagaatatacatttttttcagcaccacaccacacctattccaaaattgaccacatagttggaagtaaagctctcctcagcaaatgtaaaagagcagaaattataagaaactatctctcagaccacagtgcaatcaaactagaactcaggattaagaaactcactcaaaaacgctcaactacatggaaactgaacaacctgctcctgaatgactactgggtacataacgaaatgaaggcaaaaataaagatgttctttgaaaccaaccagaacaaagacacaacataccagaatctctgggacacattcaaagcagtgattagagggaaatttatagcactaaatgtccacaagagaaagcaggaaagatccaaaattgacaccctaacatcacaattaaaagaactagaaaagcaagagcaaacacattcaaaagctagcagaaggcaagaaataactaaaatcagagcagaactgaaggaaatagagacacaaaaaacgcttcaaaaattaatgaatccaggagctgcttttttgaaaggatcaacaaagttgattgaccgctagcaagactaataaagaaaaaaagagagaagaatcaaatagacgcaataaaaaatgataaaggggatatcaccaccaatcccacagaaatacaaactaccatcagagattactacaaacacctctatgcagataatctagaaaatctagaagaaatggataaattcctcgacacatacactctcccaagactaaaccaggaagaagttgaatctctgaatagaccaataacaggagctgaaattgtggcaataattaatagcttggccaaccaaaaagagtccaggaccagatggattcacagccgaattctaccagaggtacaaggaggaactggtaccattccttctgaaactattccaatcaatataaaaagagggaatcctccctaactcattttatgaggccagcatcatcctgataccaaagccgggcagagacagaaccaaaaaagagaattttaaaccaatatccttgatgaacattgatgcaaaaatcctcaataaaatactggtaaaccgaatccagcagcacatcaaaaagcttatccaccatgatcaagtgggcttcatccctgggatgtgaggctggttcaatatacgcaaatcaataaatgtaatccagcatataaacagaaccaaagacaaaaaccacatgattatctcaatagatgcagaaaaggcctttgacaaaattcaacagcccttcatgctaagaactctcaataaattaggtattgatgggacatatctcaaaataataagagctatttatgacagacccacagccaatatcatactgaatgggcaaaaactggaagcattccctttgaaaactggcacaagacagggatgccctctctcaccactgctattcaacatagtgttggaagttctggccagggcaattaggcaggagaaggaaataaagggtattcaattaggaaaagaggaagtcaaattgtccctgtttgcagatgacatgattgaatatctagaaaaccccattgtttcagcccaaaatctccttaagctgataagcaacttcagcagagtctcacgatacaaaatcaatgtgcaaaaatcacaagcattcttgtacaccaataacagacgaacagagagccaaatcatgagtgaactcctattcacaattgcttcaaagagagtaaaatacctaagaatccaccttacaagggatgtgaaggacctcttcaaggagaactacaaaccactgctcaatgaaataaaaggatacaaacaaatggaagaacattccatgctcatgggtaggaagaatcaatattgtgaaaatggccatactgcccaaggtaatttatagattcaatgccatccccatcaagctaccaatgactttcttcacagaattggaaaaaactactttaaagttcatatggaaccaaaaaagagcccgcattgccaagtcaatcctgagccaaaagaacaaagctggaggcatcacactacctgacttcaaactatactacaaggctacagtaaccaaaacagcatggtactggtaccaaaacagagatatagatcaatggaacagaacagagccctcagaaataatgccacatatctacaactatctgatctttgacaaacctgagaaaaacaagaaatagggaaaggattccctatttaacaaatggtgctgggaaaactggctagccatatgtagaaagctgaaactggatcccttccttacaccttgtacaaaaatcaattcaagatggattaaagatttaaatgttagacctaaaaccataaaaaccctagaagaaaacctaggcattactattcaggacataggcatgggcaaggacttcatgtctaaaacaccaaaagcaatggcaacaaaagccaaaattgacaaatgggatctaattaaactaaagagcttctgcacagcaaaagaaactaccatcagagtgaacaggcaacccacaaaatgggagaaaattttcacaacctacttatctgacaaagggctaatatccagaatctacaatgaactcaaacaaatttacaagaaataacaaacaaccccatcaaaaagtgggcaaaggatatgaacagacacttctcaaaagaagacatttatgcagccaaaagacagatgaaaaaatgctcatcatcactggccatcagagaaatgcaaatcgaaaccgcaatgagatattatctcacaccagttagaatggcaatcattaaaaagtcaggaaacaacaagtgctggagagtatgtggagaaataggaacactattacactgttggtgggactgtaaactagttcaaccaatgtggaagtcagtgtggcgattcttcagggatctagaactagaaataccatttaacccagccatcccattactgggtatatacccaaaggactataagtcatgctgctataaagacacatgcacacgtatgtttattgcggcactattcacaatagcaaagacttggaaccaacccaaatgtccaacaatgatagactggattaagaaaacgtggcacatatacaccatggaatactatgcagccataaaatgagttcatgtcctttgtagggacatggatgaaattggaaatcatcattctcagtaaactatcgcaagaacaaaaaaccaaacaccgcatattctcactcataggtgggaattgaacaatgagatcacatggacacaggaaggggaacatcacgctctggggactgttgtggggttgggggatgggggagggatagcattgggagatatacctaatgctagatgacgagttagtgggtgcagcacaccagcatggcacatgtatacatatgtaactaacctgcacattgtgcacatgtaccctaaaacttaaagtataataataaaaaaaaacaaaaaaaagaacactggcttataccctataatacctgatatttaataataaaaagaattacaggagagaaaagtctctacacacaaacacacacaaaaattttcccataataactcaaacatttgttttactgtaagaaattcagaggtctgatttaaggatgaccttctaattgaaaagaggaaaagcaatggaaagatatctgtatttgtaactgaaactggctcaaatcatagctgtattctcctttctttgaaatgtgtagaattatagccaatgggttaagaaaaattatttaaaacttgaaaataaggcaaccaagtagagcagcatatcctttcaatgtcatattggaacatttttaaaataaataaacctgaacaaggattatttattcaggagaacttctttaacttttgttttttactcttaattagagtctagacactgggaagttgtgtgttagtgtttagatttttggcagtagatgtctagtggaaaaaagaaccctatgtgttacacattttaggacattaaccagctttgcatgtaacctagcaattttatactaaaattttcaaaggctagaaacaccttctccatcagctctctttggatcagccttatttttttgccggtttcttcattattgagttgagtaaatcttgacatatatttattctgtatttttacaagtcctgttttcaactttaaaaaattttttcactttgtcaagattcaaacgtctcaagtgaaatagttactacttgtcattatggtatatatttgtaggttgacaagtgctcctggtggtagttcatagtgatctgcagagatgaaaatgcatgtttacgacgtttaaaagtagattgctgagcctgtgcatgacttagacttcatcaagtgactccgatgtgattagcaaatgattctacttgtgtggatggaagagtttcaggggccagagctggccttgtgcaaggaatctagccagaacatttcagaagagcctagggatgcagtggtgccccacgaggcagctgttcatctttgcccctccagcacctggtgtggggttttttaagctctcaaccatgtgtgtggtagtttcctggagttaccatccttgtccttcaggggatttgaggatttgagcctctttttgcagaggctccagaaacgcaaggttgggtcttcagaatgatctctaggaaggaattgagtgtatcagacattaaatttacttagttccagtttacccccaccgtgcactttttcttatctctctccctcttccattaatcccatttttctccctcctttccttccctcctcccctttttttttgtgttgacctatttacaaactcacctcacttgagatgatgtggaagattacatcacgcttaacatatatatatatatatatatatatatatatatatatttgattacctgaaggctttctataatgccttagtggaagcctttatggtaaatgccaatcaatgaaacacagggagtagaagtttcctgtgtatttgaatgttgcattgatcaccttatctagtgtacctagccattttcttaaggtagtaattaaagtgtttcatacttgaagtggtttagggtcatgaattttgaattgacagaatactcaaagtacagtgctgtattttcttatgtagctcatgtaggtcagcactcaaaagtcaggtaagatgttgctgaaagtataaatgagtggaaaacaagaaaggctgttaaattctttgccagagaaatcttcataaatagaacaagtgaccatccgggtgggagactgaaaatgtctgttcctgaattcactgagatagagaggtagaatatccccacaatattttgggggacttttgcttctttaattcattgtctgattatgttgataaaaccccggggatggagatatgtacagttcaacagtctcaggaaggaggccccttaagtacaatgtttaggggattcaagataagtgtgggctcagaatggtgtcaggaatcagaaccctggagccagtgagaaagccagacttcacatgaatgacatctgaagtctagtaagagctcaaggtcagttgatgtcttgaggggagccaggcatggtgtaagaaccaggatttcttcaagagggaactttagaagaatgtagtggagaatgctgacgccactccagactgaaagctcatagtcgacagctgcctcctcacaagagcccacctggttctgggttctgttcacagcattttctgggcatcatgtcatttaaccctcacagcaggccagtgagagagtaatactattacttttcagtgttgtaggggaagaagtggccttagagaggtgaactttccttctaagagtatcaactgatattgaagcttgcattggaacccaggttggtctctctccacctctgtgctgccagtcgtgaccctgtgctgccccctatgtctgctcctcccacctgttgcaagtagccagcctcttacctgatgaagaccatcagccctgaaggtccaggctctttggctcctgcagaaagcccaattggggtgggacatctggtcatgcagaagccacgtgactggtgggcacaggactcccaggcacctgttctctcaagggtgggctcttctggggacatttgggggctacttatgattcttttgagctgtcctttgacttattccttccaacctccaacataaagggccactcagagaagcagtacctatggcagctttaaaccgccctgctcctctgctgttctgtctgacagcatgagaagccagcaaaagcttcttcacatcagggtgccagtggggaaacaggaaggaaaagggggaataagaaggaaaagcatgctattttctacacaggggaggatttcataccaatgtgttcagaatggttttacaaagactgtgcatatatgctccaggtctgttcaggaaagattcatttgtggaggattgaaatgttcctattaatatttcttagagaaacagaggcatctactgaatttcacaaaatgtaatatgaaaactgatctccaagggtcagctttaatattttacttccttcttcattgttgaaaatatatttcagctctcttttacataccagcatacagcacagggagaagatagcataatcactgtgaaagtattatcaaatgcaagcacgcatttgcatttttggcaaacaaccacttttgattttacattgtattgttccataatatttaaagcacaaagtcctgaaattatcaaacctacttgagtttgcgatagtcagatactagtttcattgtgcttttaattaataaaatgtggattgtctaaattaaaattttcattatgaaatattttggccataagggaaaaaacagaattaaatggtattcatgtatgtgcctaccactcagattttacagatactaactttgtgctgtattttcttcaaacgtgactttatgttgtgactattaataaaatagcacattacaggtgtagttgttgtacagccccgttcacgtcctctcttcctccctttctcctttcatgaggctgatgtatattagtcccctgaattattattattattatttttttttgagacagagtctcgctgtgtcaccctggccggagtgcagtgccatgatcttggctcacagcaacctctgcctcctggttcaagtgattctcttgcctcagcctccccagtagctgggactataggtgcacaccaccacgcctggctaatttttgtattttagtagagacggagttttgccatgttggccaggctggtcttgaactcctgacctcaggtgatccacccacctcggcctcccaaagtgctggaattacaggcatgagccaccgtgcccagccccctgaaagtttttatgctttgacaacatggttgtgaaaatactaagtgaaattttctttagagctgtattttgaagtaacattatcaatttagagccataagcctattcttttattattatactttaagttgtagggtacatgtgcacaatgtgcaggtttgctacataggtatacatgtaccatgtttgtttgctgcacccatcaacttgtcatttacattaggtatttctcctaatgctatcctccgccagcccccctacccacgacagccccagtgtgtgatgttcccctccctgtgtgcatgtgttctcattgttcaactcccacttatgcgtgggaacatgtggtgttaggttttctgtccttgtgataattttgctgagaatgatggtttccagcttcatccatgtccctgcaaagcacatgaactcatccttttttatggctgcataatattccttggtgtatacgtgccacattttcattatccagtctattattgatggatatttgggttggttccaagtcttgctattgcgaatagtgccacaataaacatacatgtgcatgggtctttatagcagcatgatttataatcctttgggtatatacccagtaatgggatggctgggtcaaatggtatttctagttctagattcttgaggaatcgccacactgtcttccacaatggttgaaccagtttacagtctcaccaacagtgtaaaagtgttcctatttctccacatcctctccagcacctgttgtttcctgactttttaatgatcgccattctaactggtgtgagatggtatctcattgtggttttgatttgcatttctctgatggtcagtgatgatgagcatattttcatatggctgttggctgcataaatgtcttcttttgagaagtgtccatttatatcctttgcccattttttgatggggttgtttttttcttataaatttgtttaagtactttgtcaattctggatattagtcctttgtcagatggatagattgcaaaatttttctcccattctgtagattgcctgttcactctgatgatagttactttggctgtgcagaagctctttagtttaattagatcccatttgtctatttcggcttttgttgccattgcttttggtgtttttagtcatgaagtctttgccaatgcctatgtcctgaatggtattgcctaagttttcttgtagggtttgtatggtgttaggtcttacatttaagtctttaatccatcttgagttaatttttgtataaggtgtaaggaagggaatccagtttcagctttctacatatggctagccagttttcccagcaccatttattaaatagggaatcctttccctatttcttgtttttgtcaggtttgtcaaagatcagatggttgtagatgtgtggtgttatttctgagggctctgttctgttccattggtctatatctctgttttggtaccagtaccatgctgttttggttactgtagccttatagtatagtttgaagtctggtagtgtgatgcctccagctttgttcttttggcttaggattgacttggccatgcaggctcttttttggttccatatgaactttaaagtagttttttccaattctgtgaagaaagtcattggtagcttaatggggatggcattgaatctataaattaccttgggcagtatggccattttcacgatattgattcttcctatccatgagcatggaatgttcttccatttctgtcctcttttattttgttgagcagtagtttgtagttctccttgaagagttccttcacatcccttgtaagttggattcctaggtattttattctccttatagtaatttgaatgggagttcactcatgatttggctctctattcttggtacataggaatgcttgtgatttttgcacattgattttgtatcctgagactttgctgaagttgcttatcagcttaaggagatttttgggctgatacgatggggttttctagatatacaatcatgtcatctgcaagcagagacaatttgacttcctcttttcctaattgaatagcctttatttctttctcctgcctgattgccctggccagaacttccaacactatgttgaataggaatggtgagagagggcatccttttcttgtgccagttttcaaagggaatgcttccagtttttccccattcagtatgatattggctgtggatttgtcataaatggctcttattattttgagatacattccatcaatacctattttattgagagtttttagcatgaaaggctgttgaattttgtcaaaggccttttctgcatctattgagataatcgtggtttttgttattggttctgtctatgtgatggattatgtttattgaattgcatatgttgaaccagccttgcatcccagggatgaagaagacttgctcgtggtggataagctttttgatgtgctgctcgatttggtttgccagtattttaatgaggattttcacattgatgtttatcagggatattggcctaaaattctctttttttgttttgtctccgccaggctttggtgtcaggatgatgctggcctcataaaatgagttagggaggattccctgtttttctattgattggaataatttcagaaaaaatggtaccagctcctctttgtacctgtggtagaattcggctgtaaatctttctggtcctggactttttttggttggtaggctattactgcctaaatttcagaacctgttattgttctattcagagattcaactacttcctggtttagtcttgggagggtgtatgtgtccacgaatttatccatttcttctagattttctagtttatttgtgtagaggtgtttataatattctctgatggtagtttgtatttctgtgagattggtggtgatatccctttatcattttttattgcatctacttgatttttcactcttttcttctttattagtcttgctagtggtccatctattttgttgatcttttcaaaaaaccagctcctggattcattgatttttttgaagggtttttttgtatctctgtctccttcagttctgctctgaccttagttatttgttgtcttctgctagcttttgaagtttttacttttctctagttcttttaattgtgttgttacggtgtcaattttggatctttcctgctttctcttgtgggcatttagtgctataaatttccttctacacactgctttaaatgtgtcccagagattctggtacgttgtgtctttgttctcactggtttcaaagaacatctttatttctactttcattttgttatgtacctagtagtcattcaggagcaggttgttcagtttccacgtagttgtgcagttttgagtgaggttcttaatcctgagttctaatttgatggcactgtggtgtgagagacagtctgttgtaatttctgttcttttacatttgctggggagtgttttacttccaattatgtggtcaattgtggaataagtgcgatgtcgtgctgagaagaatgtatattcttttaatttggggcggagagttctgtagatgtctattaggtctgcttggtccatagctgagttcaattcctggatatccgtgttaattttctgtctcgttgatctgtctaatattgacagtgaggtgttaaagtctcccattattatttagtgggagtctgagtctctttgtaggtctctaagaacttgctttatgaatctggatgctcctgtattgggtgcatatatatttaggatagttagctcttcctgttgaattgatccctttaccattatgtaatggcattctttgtctcttttgatctttgttggtttaaagtctgttttatcagagaccaggattgcaacacctgcttttttttttttttttttttttttgctttccgtttgcttcttcctccatccctttattttgagcctatatgtgtctttgtctttgcacatgagatgggtctcctgaatacagcataccaataggtcttgactctttatccagtttgccagtctgtgtcttttaattagggcgtttagcccatttacatttaagtaattggtgttacttatgtgtgaatttgatactgtcattatgatgctagctggttatttcgcccattaattgatgcagtttcttcctagcatcagtggtctttacaatttggcatgttttagcagtggctcatatcagttgttcctatccatgtttagtgcttcctttaggagctcttgtaaggcaggcctggtggtgacaaaatctctcagcatttgcttgtctgtaaaggattttatttctccttcacttatgaagcttagtttgtctggatatgaaattctgggttgaaaattctttaagaatgttgaatattggcccctactctcttctggcttgtagggtttctgcagaaagatccgctgttagtctgatgggcttccctttgtgggtaacttgacctttctctctggctgcccttaacattttttccttcctttcaaccttggtaaatctgacaattatgtgtcttggggttgctcttctcaaggagtatctttgtggtattctgtgtatttcctgaatttgaatgttggcctgccttgctagattggggaagccctcctgggtaatatcctgcagagtgttttccaacttggttccattctccccgtcacttgcaggtgcactagtcaaatgtagatttggtctttcacatagtcccgtatttcttagaggctttgttcgtttcttttcactcttttctctgatcttgtcttctcgctctttttcattaatttgatcttcaatcactgatatcctttcttgcgcttgatcaaatcggctattgaagcttgtgtatgcttcacgcagttctcgtactgtggttttcagctccatcaggtcatttaagctcttctctacactggttgttctagttagctattcatctaaccttttttcagggtttttagcttccttgtggtggattagaacatgctcctttagctcggagaagtttgttattaccgaccttctgaagcctacttctgtcagctcgtcaagctcattctccatgcagttttgttcccttgctggagaggagctgcgatcctttggaggagaagaggtgctctggtttttggaattttcagcctttctgttctggtttctccccatctttgtggttttatctaactttggtctttgacgttggtgacctacagatgaggttttggtgtggatgtccttttttgttgatgttgatgctattcctttctgtttgttagttttccttctaacagacaggcccctcagcttcaggtctgttgcggtttgctggaggtccactccagaccctttttgcctgggtaacacccctggaggctgtagaacagcaaatattgctgcctgatccttcctctggaagctttgtcccagaggggcacccacctgtatgaggtgtctgtctgctcctactgggaggtgtctcctagtcaggctactcgggggtcagggacctgcttgaggaggcagtctgttcattatcggatcttgaaccctgtgctgggagaaccactgctctcttcagagctgtctggtagagatgtttaagtctgcagaagatgtctgctgccttttgttcagatacgccctgcctccagaggtggaatctagagaggcagtaggccttgctgagctgtggtgggctctgcccagtttgagcttccctgctgctttgtttacactgtgaacatagaaccgcctactcaagcctcagcagtggcagacacccctccccctgccaggctccagcatcccaggttgatcttagattgctgtgctagcatcccaaggatctgtgggcgtgggaccagccaagccaggcacaggagggaatctcctggtctgccgattgtgaagactgtgggaaaagcacggtattttggcaggagtgtaccgttcctccaggtagagtcactcatagcttcccttggctaggaaagggaaatccctggaccccttgtgcttcccgggtgaggtgatgccccaccctgctttggctcgccctccataggctgcatccactattcaaccagtcccagtgagatgaaccaggtacctcagttggaaatgtagaaatcacccgtctgctgcgtcaatatcactgggagctgtagaccggagctgttcctatttggccatcttggaagtgacccgtaagtctattcttaaagtcatttttctgtgagatataattcccgaagtgcctacttgttggaggaggttgaggttagtataattactatcaaaaaatacactttcagaaattggttccagcttttcctgcccctcactccttctctgagcagcttgatggatccttccccacgtgtgtcccttataggtgtccgctccggcagataccccttggagacatatgcagagataactaccatttgtttggattttgctccaacacaaccagcttatacacattatacaaaaacttgcttttttcatttctcagttcatcatgaacatgctcacatctaagtagattgataatctggtgctttctaatatatttacatagaagtttatatcacaaattctgttcctttcattttcttcttttttaaaccagagccttttctccttaacttcactaaatgaagctacccctctctttttcagcctcccttctttccggtgctgagtgttagccatctgagtgtatgcttcccaccatttctaaatgcttttacgatcgtgtgtatacatgtgcacatgcacgtacacactcatccacacacatgcacacataggtatatttgatcattgctgtacaaaaacgggatcacacttgctacattctataaactaagtggctgttactgttgaggtttgaaaaacataaaaaaaaaaaaaagccccaacattgctcaaggtgccagaacatacctgggagatccagacctctcacccaggttttctcaggcagtcactttctctgcacccagcttcaaatgaagaccagtcccacacagccctggcagctcagggcagcgttcgtgggccaggccttcccaacctctgctttgggtttgcaggagaacagccacctcctatcatccagatttcaggcaccgcttcctctgatatccaaggtcatgttagactgtacctggaaccatgactgcatgaggttcacaaggacaccaaagctttattttttattttttaacatagtagtttttgactccatctaatctgtttgctaaggttaggggcaatgtggcattcacatgctatttacctaacatttccaatactttcatccttcatcaaggttattacttttctggttggcaatggactcaaatcctcattcccaaaagcttgttctcagggctgggaaaggcacagttgctctgttggcaggtgggcagatttccatgggctaaaacaaaactgaagcagaagtcaccgtatttctgctgctcctgacccttgacagagaaagagagtggaaaatttctcctcggtatttgttagctttatcgtggggtgtcacacgatgcatttgaaaaaagttaatttgaaattttaatttcaacactgatttttaaaccagaactatgtccatctctcttgtctttttatcctcagctctggctgattcccgctggaattatttccaatatgttctccagaaaaccatctcctgtcagaaactttcaggatcacaggggccgaatgcgtctgtttagctattaggttgaatcatatgataacattacatttttgtacgtcaaaaatggccagatagtgtcacttaagtggttcaacccaatatgtttaccctgaatatttacaggtcggaaggcttgggagctagaaggccccattaggattttgttacccagttctcaatatttacaggggaccaccgggagccggcctaattgcccagttggtgatgaattgattcacctgtgctgaagccgtcctcatacagtccccctgacgaactgtgaagtgtagtgtgaacggtcaggctccaggaggtgtaggcttcaaggattacaataaaggatgggggttttttaaagcccagagggctattccctggcaggaaaggaaagttgggcaaacaccctggaggggcccaaacccaagagacctcaggacctgagattgcccctgactctgaggattcaaatcagacagatcctcttcctggcctcttctatccacaccctagtctccccacactgtttgaaatgatgtgggcagaatgcaggccactcacactgactgcagagggctgacttgggcaggtgggcatgagcctttctgcccagcgtgagtccctctggcacagctggatgctgacctgcagggaggcgcttcagcgagtacttgagcagggtcgaggatgagaagccaaactgtttctcatgttctcctgcaaaatgaatttatttccttgttagagaacagtgggcatacccctagtcaaatataagtgaaaatcgatgcatctttatttacaaaaagttagaaagatatggacagatagaaaaaaattacccgtcttcccaccactacaaatcattattactactactttggcaaatttccttccagattttaatgcattaaaaaaatacataattatgctaagtctttgtcttgatactgctaatccatgtatactttatataataatacatagaaaatattctatataaaacatatattgacaaggactatatactactatagagattgtatacaaaatacaactagcatgcattttatatttctacccttttcattcatcataagtaaatactctatgcacataaatgttgcatagtgttccctacagtcgattttccatcatgtagttaacaattttttttttttttagtgtagtagttaagtacgtggactctggacggttgggttcaaatgtcaacacactgattgtgtgaatgtgggcaagatgtttaatctctgtttgtctcagtctgttaatctttaaaataggtctaagagttatatgtagcctgttaaagaaaaaaaaaaaagaattccacatagcctgttgtaaaaaagagaccaaagtcttcagatgttgccatttataagaagtatattgaagggaggtaagctatgtttaccagccatggctcagatccctagcatgtcaaaattagatgttgtcttttatgtctgaatatatcaaaggccccatctgaggtttgcctttaaacaaaagaggagaagaaattttgtgcctaagacacaaaatttgggcattgagtcactgtgatactagctggcaggggaatggggaccttctagccatgagctaaggttactgaaaacattcctttcaacataacatttgcaggacagataatttgttgagtgagacatttgggagtctataaaatcattacagtatccaggggaacaaaacattaaacatttacaaaggggccactgtgttgttcagggagcaaaatattagcatttctttgttaattaagattttgaacttttgattaaggagtttttaactttgtacaaggactgattttctgattaattcatgggtcgctgggaggatcaaacacttagaacaagagtctgcaaatgtttcccataaagggccaggtagtaaatatttttaagttttgtgagccatatgcaaggctgtgtcacagcttctggattctgctccctgatgtgaaagcagccacagacagtatgcaaatcaataagtatgactgagttccaatatgacttttgttatggatgctgaaatttgaatttcatgtcattttcacatcacagatttttttcttttgattaaaaaactatttaaaaatgtaaaagaaaaaacattttagactctcaactgtacaaaaagcatttggctcctgggctgtagttggctaacccctggcttagagcagtacttggcactagtgactgctatgtatgtgttggctcctacccccacaattgcagctgttgttatcaccatcgtcaccatctacatccttctgctattataaataaagcactgaagaacatcttcagggagaaaggtttttgtccctcccctgcttttgcagttactaactgtgctgcagccctatgctagggccagatggtgctaggttctggagaaatctctgcatgcctttgacttcctgggagtccatgtgtaacagctgcagcttgatcagctcctcacttcaccatggcagagaggtttcccctcccatgctgatggtcgttcctcaccagaggctgcctggaaagctgtgctgggctccaggagaatgggcttcatgatggattatcaagacccaccttggagtgatgtttgcacatgtgctgtgttctttgttggacatcatagcctgtgctctccctggggatgaatgaaaaagggagacagagatgcctactgtacatgacatgtatttatcccttgttttaaagtgacgagaggtgggagaaagggggtcataaaaggagtggtacaaggaggagctgggaagtaagggaagaaagaataggacattgttgctagaatgagccatgatatctggattgttccaaatcccccatgcactcagctgagtagaaaaattgcaaatatctttataaaccttgacaatactatttcattattcataaagacttttttaaaaatcataaccagcttcaattttaaaggaaatttattcccaaagcattttttaattgagtttttatggtaattctttgtattgactgttgaatcaacataccaaataaaatatgttccagtgttttcttttattcaggaagtcttaattctgcttcttcaaaataatgaagtggcgagagtcaattcagattttcatgaattacatacctggcagtacacggccttttctaagagtaaatttaaaagagtattattttttaactaggaaagtttgccttaaattcagaatcgttggtgtatgatctttcattgtgttttcctgtgtaatttatgagtgtgtgtgtgtctttctgtattgttaagacttttaataactcacttctgaaatagaagttacttgaaggcaggtactatttttgttttaaacacatctttggatgaaatgtatcatttctgtcttgcacagtgccttgcgtagtagtggacgtccaaaattgtgtgatgagaagaaggaactctaggggttgcaaggcatctagtggttatttgcctttcccttccctagacagtgtctctgctgtatacagccagccctgactacagtattgctcaggacaaaatcttctctgctattcctgtttctgtagtggcacagaatactgtcaataccctttcagatgcctgacgacgttgttagtccaactaacaacggaagttagtacaacttccatctcagttaatcaccgcacctcacacacctttctttttatttcctgggctaaataactggcttttttttttttttccaacttttctgacatgcctctctcctctgatatatctgcttctttctggccactcttgtgtgcacgatttcttgtgtatcaggaactgggttgcattgtggcctgcagactgtgcatcgtgtccacatgtgacctgggcagggcccagtccagtggaacctcttctgttcttgttgtgctaatattaataaaacccaacatggcatagccttctggctgccacatgaagttgactcctcttggacttgttggcagctccaactcttagttgataaattgaacggtcatggactctgcttggtttcagaacattttcagggaggatattcccttagtgacacttggaggtggtcttagagcttcattgaacctggggtatcacaccaggggtaaagttgtggagttgtccagcccagagaaacagagccaaggctgggaccaggaggtagcaggtgggtgaatggaatgagagagatgagcggaagtgttaaggaggccaggcaaagagaagaggatgtccatcagagagggaggtacactggggaatccagggggcttagaatctattggcctagatccctagcatcttcctgggtgtttctttcatgaggcacctttgtgcctcaccttaaagaatcaaattttaatgatgaggagctgggatatcatgaattattcatgagccagatttcccttaatctctagacatgtgcttgaatttctaaaactcttttttatgggacttcacatttctctgattaaatttcttcttgctaatggaccccatattcctagtcaccaaagaccttttgaacctaaaggggaaaaaagctgcagaattgaagtggtgactctgccacttactagccattgtcttgcccaagttgcaagttctgacctcatccataggatgagaaccataacaggtacctcgtcacttgttttgttgggtggttgggaagataattggaattttgcatttggagtgcctggtgtgaagcccatcagtatcagtgccaacaccttgtcacagttatttttctgctctcaggatattcaccatgtctctctcttaggtcaggtttgatagactgtcttctctgttttcatccaatctattgattcttattaataaattcctgttacatatggagagggaccaacagcagaatctgaagattcctagaggctacttgtaaggatctttgggacactggtccatgttgggggttacaaagtcagaggccttcaacagcctcattattcaaatgtgtaagcaaccaggtgaggagagagtggtggggcccatgtcaactcaaagaatgtatgtcctatctaaagcagtcatttcactaagagtcactgcccaatccaacacctagtacagggggagtcaagggcaccagctccatgggctgctgtgaatagctccctaacatgcgcttgcatttggttaatgtggctttggagcagtggttcttatagtatggtccagaagccatcggcagcacctaagaacttgtatgaatgcacattcttggctccattccagacctactgaatctgaggctcttgaggtggggcccagcaacctggggtttaacaggccctctaggagattctgatattcttgagaatgatttggaaagtggttctcaaccttggaaggacactggaatcaatgttctggggagctttaaaaatccaaccgcctggctcccaaccacagagcttctcattgaactgatttgggctagaacctggacaccaggattttttttaaagctccccaggggattttcaggtgcatctaagacagagaactgctgttctcaggagcttattgaaacacccacatattcatttctcctgggtgaagaggtgaggagagggaggcatgtatcatttgacagagttcctagatgacctcttttccccttacagaacatgaccttgaaccaccagcctcaagaaatagccttgaatagggcttttcatagactaagtgaatattcactcaatgtgatttgttttaaaggttgcttttaatgctgtatttgttcagcaaatgtagacgctattataacacaaatattaactcctgaatcctcaaaggctttccccacgctatgccatctggcaagcattgttatcatcatctctttattatccacgctaataaaggactagcatggcactggtaattgaaaaacacgtatcatttaaaaatcattcaggctagtgccagtactgttttcccaaccaggaagcattcaagagtagaaatattgcctgattacagtttgctacttccctgcggaggtgctaatacatattattttagtgagaaatttgagtcattggagtgagaagcttctaaattataattcctgtttctgaataaaggggtttgttttattgacaagagtcctgagcacagagacaaggaacagcaagtatatttaaaatgcatgtgcacctgggaaccagtggattaaagcgtgatataatatagaagctgcatggggatttgaggaatggtagatctggattctagatctcctgacattacctgtgtcatttgagatgagctatcctctctaccagtgggtctcaaagagtcctcaactagcaacatctgtatcacctggggatttattagagatgcagattctttggcctcaccccaggcctactggatgagacttggggtggggccagcaatcagtgctttaacaagtcctccaagaaattcagatgcctgctcaagtttgagcactgctactctccaccaggggctcagtttttttgtctataaaataagaagaccagcctagattatatttaaggtttactctagctctccagtggccatggtgtatgggcacagaataagtttagagattttctgtcttagagcttatattttcccttggatgtgtgattgaaatcattccgctgaaaaactgacaggcaggtaacagaaaagaaactgatttccaggaactagatactcagactagatacccaaacagcgccttgggtgctcactacaaaataactcataatattttcagctggttggtactactttcccaaagtgaaaaaactctggtgttttggaaagggaagtagccatctcccctttctctaggggctgagagctgtctgctgtgattcacagagcagcatttcaacagaaactaacaaatggcatttcagaaggatgtacagaggtacacaggctttgcagtaaaacaagggaaaatttcaagccatttatcaaagcccctgcagcttccatttcaagacaggtggaaaaaaataacatggaacaagaaaagaaaataaatctgtatccaaagcatctcataaataagaaaggagtgggggagttgctgggcttgctgggctctcagagtatttttgtcacagtacagaaagcttttaaatgttttggcgtgaaattcttttccttttcttgttattaaaatttgtggttgtaaaattatttcactggctattaaaaccaaaaaaggaaagctgagaaaatgatacgtggagtgagagagagagagagagaatgagaacatagttcattctgtaccccaaaatattttttatttttatctgaaatgtagtgatgctccataatttagggcacgtcattgaaaatcaaaggcaattttctaattggcttttgttcagtaagagcctatttgctgcagaaaattaggatgtggtttattgaacatgagagagacatgggtctgttataatgtctgagggggtggagaaattataacttttactaaaaagataggccagtcgcggtggctcacacttgtaatcccagcactttgggaggccaaggcgggtggattacctgaggtcaggagtttgagaccagcctggccaacatgaggaaaccctgtctctactaaaaatacaaaacttagccaggcatggtgacgcatgcctgtaatcccagctacttgggaggctgagacaggagaattgctagaacccagggggcagaggctgcagtgagccgagatcatgccactgcactccagcctgggtgacagaatgagactccatctcaaaaaaaaaaaaaaaaaatcgaccggctgcagtggctcacacctgctgtaatcctagcacattaggaggccaaggctggcaaatcacttgaggtcaggagttcgaaatcagcctggccagcatggtgaaacctcatctctaccaaaaatacaaaaattagacaggcatggtggcaggcatctgtagtcccagctactcaggaggctgaggcaagagaatcgcttgaacctgggaggcggaggttgcagtgagccgagattgcaccactgcactccagcctgggtgacagagcgagactcggtcgcaaaaaaataaataaataaaaagatggatctcaggcccactctgccagagggaataacgttgattgaggagaacctgcattgaacatctttgtgaaattcccagcaatgttgggttgttgatcaacctggttaaaagcccatgctctgagttcacagtctggctttgccacataactggctctgaaactttgggcaaactacccaattgtcagtgctttagtttcctttgggggataatgacagcatctacccggtgggagttttgtgaggattaagagctccatatgcaagacactttgcgcaatgcctggtgcatagcaggcattcttttattgagactatttgctaattagtcacgtagttctttaaaggaaccctaaaactcaattactttgttttttaactgtaaggattttttgaaaatagcaaatgaatgcctgtggaggggtgtgattgataaaaggaggcttgaagggcatatggggtgcaaaattcaaagaagattgataactcttgagccatgggatcttctcctccatcagcttcactaacatatagctttggggaattgttagaattaggttcagagatactaattttttcccactagatttcctttcttacgtatttatttttgaaactcatatagcaacactagaaataggtctgaactaagtatcatgtgtttctcttttacatttggctccccttctgtgtcagctggcctatgatgcacagtggctaatattgattagcctacatttttcttaaatacagttttctcagtctatgtaaagtctaaatgctagcagtaccaaaataaacgcattcaacttctaaactggtggtaaggaaaaaagtaggaacaaaagatagttgagacatattgtccaatgaaatcattgcctgtgatgccacagccaggtgtgaggtctggggcaagcttccaaactcatctgagcggcagtttcctcatcagtagaaccgggataagaatagcacctaccaggtgtgagatttaatacatgtaaagtacaaaatagtgctaacacccagaacgtacttagcaaatgttaacttcttaaatgttacttgtgttcatgagaatccaatgtatcaaagtgaaaataatcaatttgtgtgtaatggggaggaagttttactattctttactaaataactaaaaacattacaaaatatttaatggcaagttactttttagacttaatctctggtcatttatttccaattaagactggaccccactgtatttgacatgcggaatggtttttatttttgttacgatcatatttattttgagatgtatccttcttatcattagtagcagttctctagtattttaaaaactttccaacattggaataaatgaatcaggataaaatgctaaaataaaatactcaaatcattgcacttattcaacctctagttgtggacagcgatgctctttaaactgtggactgtggccagtaggcagcactactctctcatagtttcagatattgcctattagcttataaacaaaatttcagatcagcatgggtaagacagtttagatgtattcttgaataatgtagaaaagtgtgggttgtttgatctcaaacaagtgaacagaaaggccttccagcaccaaagttagaaaaaaaattgcctttaaccaaaattgccctggagaaacagagattcatgctgtttatccagggacaaaatgaaagtatgttatttcatacaaattatctggatcatgaggcaaaagcagttttctttcatacctctttaacttttctttttcatctgtttaacctgtgggaaaaacaacttgtcttaaattattcaccatttagatctgaatttttaaattttcttattttcagtttttttttggtttatttcagtagggttttggagaacaggtgatgtttggttacatgaataagttctttagtgatgatttctaagattttggtgcacctgtcacccgagcagtgtacactgtacccaatgtgtagtcttttatccctcaccaacccccattctttcccctaagtccccaaagtccagtgcgtcattcttatgccttagctcccacatgagtgagaacatacgatgtttggttttccattcctgagttacttcacttagattaacagtctccaattccctccaggttgctgtgaatgccactatttcattctcttttatggctgagtcatattccatggtgtatataaatatgccacgttttctttatccactcattgattgatgggcatttgggctggttccatatttttgcagttgcaaattgtactgctgtatacatgtgtttgcaagtatctttttcatataatgacttcttttcctctgggtaaatacctagtagtgggattgctggatcaaatggtagatctacttttagttctttaaggaacctccacactgttttctatagtggttgtactagtttaccttccaccaacagtgtaaaagtgttcccttttcactgcgtctatgccagcatctattgttttttgatttcttgattatagccattcttataggagtcaggtggtattgcattgtggtttcgatttgcatttccctgattattactgatgttgagcatttttttccgtatgcttgttgtccatttgtgtatcttttgttgagaattgtctattcatgttcttagcccactttttggtgggattgtttttttcttactgatttgtttgagttctttgtaaattctggatattagtcttttggtcagatgtatagattgtgaagattttctcccattctgtgtgttgtctgttaactctgctgattatttccttttctgtgcagaagctttttagttaaattaagtcccttctatttatgtttgtttttgttgcatttgcttttgggttcttggtcattaagtctttgcctaagccaatggctagaggggttttccagtgtcatcttctgtaatctttatggtttcaggtcttagatgtaagtcttttttttttttgagacggagtctcactctgtcgcccaggctggagtgcactggcgccatctcggctcactacaagctctgcctcccaggttcacgccattctcctgcctcagcctccggagtagttgggactataggcgcctgccaccacgcccagctaattttttgtattttttttttttttttagtagaggtggggtttcatcatgttagccaggatggtctcgctctcctgacctcgtgatctgcccaccatggcctcccaaagtgctgggattacaggcgtgaaccaccatgcccggccttagatttaagtatttgatccatcttgagttgattttcgtgtaagttgagagatgaggatccagtttcattcttctacatgtggcttgccaattatcccaacaccatttgttgaatagggtgtccttttcccactttatttttttattttctttgtcaaagatcagttggctgtaagtatttggctctatttctgggttctctattctattctattggtctatgtgcctatttttaaaccagttccatgctgttttgatgactgtcgccttatagtatagttggatgttgagtaatgtgatacctccagatttgttctttttgtttagtcttgcattggctctgtgggctcttttttggttccatatgaattttaggattattttttctagttttctgaagagcagtggtggtatttggataggaattgcattgaatttgtaaactgcttttgacagtatggtcgttttcacaatattgattctacccatccatgagcatgggatgtgtttccatttgtttgtgttgtctatgatgtctttcagcagtgttttgtagttttccttgtagaggtctttcacctccctggttaggtatatttttaagtattttatttttttgcagctattgtgaaagaggttgagtgatttgattttcagcttgatcactgttggtatatagcagagctactgattggcatacattaattttgtatcctaaaactttactgaatttatttgccagttttaggagcttattggataagtctttagggttttctaggtatacaatcatatcatcagcaaacagtgacaatttgacttcctctttattgatttggataccctttatttatttctcttgtctgattgctctggctaggacttccagtactatgttgaatagtggtgaaagtgggcatccttgtctgttctagttctcagggggaatgcttccaccttttgcctattcagtagaatgttgatggtgagtttgttgtaaatggcttttattaccttaaggtatatcccttctatgcagattttgctgagggttttaatcataaagcgatgttggattctgtcaaatgcattttctgcatctgttgagatgatcatatgattttcgtttttgattctgtttatgtggtgtatcacatttattgacttacatatgttaaaccatcccagcatccctggtatgaaacccacttgatcatggtggattatctttttgatacgctgttggatttggttcactagtattttattgaggatttttgcatctgtgttcatcagtgatactggtctgtagttttctttttttatgatgtccttccctggtttttggtattaagatgatactggcttcatagaacgattaagggaggattccctctctctctatcttttggaatagtgtcaatagattggtactaattcttacttgaatgtctgatagaattcagctgtgaatccatctggtcctggactttttttggttggaaattttctttattaccatttcaatctcactgcctgttattggtctgctcagagattctatatcttcctggtttaatctagaaaagttgcatatttccaggaatttatccatctcttctaggctttctagtttatatgcataaaggtgttcatagaagccttgaataatcttttatatttctctagtatcagttgtaatatctcccattttgtttccaattgagcttatttggatcttctctcttctttttttggttaatctcactaatggtctatcttcttttttttttttatcttttcaaagaaccagcatatcgtttcatttatcttttgtatttttgttgttgttgttgtttgtttcaatttcatttagttctgctctgatcttcattatttcttttcttctgctgggtttgggtttggattgttcttgtttctccaggtccatgtttgtgctctttcagacttccgatgtaggcatttaatcctatgaactttcctcttagcacaaccattgctatatcccagaggttttgataggttgtgtcactattatcattcagttcaaatatttttttaatttccatcttgatttctctgttgacccagtgatcattcaggagcaggttatttaatttccatgtgtttgcatggttttgtggattcctgttggagttgatttccaattttattccactgtggtctgagagagtacttgatataatttcagttatcttaaatttactgagacttgggccaggcacagtggctcacgcctgtaatcccagcactttggaaggccgaggtgggtggatcacctgaggtcaggagttcaaaaccagcctggtcaacgtggcaaaaccctgtctctactaaaaatacaaaaagtagccaggcatggtggcacgtggctgtattcccagctactcgggaggctgaggcaggagaattgcttgaacctgggaggtggaggttgcagtgagcgagattgcaccactgtattccagcctggtgacagagtgagactctgcctccaaaaaaaaaaaaattactgagacttcttttgtggtctatcatatgatctgtcttggagagcattccatgtgctgatgaatagaatgtgtattctgcagttgttgggtagaatgttctgtaaatatccattaagtccatttgttgtagggtatagtttaagtccattgtttctttgttgactttctgtcttgatgacctttctagtgctgtcagtggagtattaaagtcccccactattattgtggtgccgtctatatcatttcttaggtctagtagtaattgttttataaatttgggagatccagtgttagatgcatatatatttagtattgtgatatttccctgttgggctagtccttttaccattatataatgtccttctttgtcttttttaactgctgttgctttaaagttagttttgtctgatataagaatagctactcctgcttgcttttgttgtccatttgcatggaatatcttttaacctttaccctttacctgaaatttatgtgagtccttatgtgttaggtgagtctcttgaaggcagcagaaacttggttggtgaattcttatcctttctgccgttctgtaccttttaagtgaagcattgaggccatttacattcaatgctagtattgagatgtgaggtactgttctattcattgtgctatttgttgcctgaatactttgtgttttcttcattgtattattgttatatacacaacatgtatgtattgtgagatttatgctttaaggtcctctgagatatatgctttaaggaggttctatttttttctttttttttttgaggatttgtttcaagatttagagctccttttagcagttcttgtagtgctggtttggtagtggggaattctctcagcatttgtttgtttggaaaagactgtatctttccttcacttatgaagcttagtttcactggatacaagattcttggccgataattgttttgttgaaggaggctaaaaataggacctcagtcccttctagcttgtaagttttctgctgagaaatctgctgttaatttgataggttttccgttataggttacctgatacttttgcctcactgctcttcagattttcttttgtcttaactttagattacctgttgactatgtgcctaggtgatgatgtttttgtgatgaatttaccaggtgttctttgggcttcttgtatttggttgtctagatttctagcaaggtaattgagggagttttcctcaattactcccagaaatatgttttccaaacttttggatatctctttttccttaggaacaccaattattcttaggtttggacgtttaacatagtcccatacttcttggaggcttttttcattttttaaattcttttttctttgtctttgacggattgggttaattcgaaagccttgtctttgagctttgaggttctttattttgcttgctaattctactgctgttactttccagtgaattttgcatttctctaagtgtgtccttggtttccagaagttctgattgtttttatttatgctgtttcactgaagaatttttctttcatatactgtatcctgttttttatttctttaaattggacctcaactttctctgccgcctccttgagtaacttaataatccactttcagaattcttactctggcaattcagatatttaatcttggtttggatccattgctggttagctagtatgatcttttgagatattaaagaaccttgttttgtcatattaccagaattgtttttctggttccctctcatttgggtagactaagtcagagggaagatctgagactcaaggactactgttcagattcttttgtcttacagggtgctcccttgatgtggtgttctcccccttctcctaggaatgtggcttcctaagagccaagctgtagtgattgtttttgctcttctgggtctagccacccagcagagctacccagctccatgctggtactggcaagtgtctgcagagtcctgtgatatgatcggtcttcaggtcttgcagccattgatacctgcacctgcttcagtggagttagcaggggagtgaagtggactctgtgcgggtccttggttgtgtttttgtttagtgtgctggttgcctcccagggagcctgcggtggtgatccagttccttcaaagggtctgtgaattatctcagctttcctggtatgttcctgcggttgttcttggaacaaaagttcatgatgtaagtctccacatgctactctatccttccaaatggaagctgcaactagtccttcctcctatccaccatcttggaaaaactggcagatgtgcattttcaggatagttcctggtcattgttttcagtaattaatggtgaagagtagattgctaatcttagtaagaatctagtgatgtttttgctgggtgatctcaagtagatggagagttcagatcagcccggccttctcctcttaggcatatttgtaactattttttatttgggtaaatttatggggtacaagtataatttttgttgcatggatacactgaatagtggtgaggtcagggattttagtgtatccatcacctacatagtgcattgtactcagtaaacaatttctcatcatcccaccaattcccagccttctgagtttgcattgtctatcattccacactccatgcccatgtgtgcaaatcatttagctcccacttctatgtgagaatatgtgacatttgactttctgtttctgagttatgtcacttaaaataatggcttccagttccatccatgttgctacaaaagatatgatttcattctttttttatgaccaaatagtatcccattatgtgtatgtactacattttctttatccagtcatccattggtggacacataggtggattctatatctttgctattgtgaatagtactgcaataaacatacgagtgcagatgactttttggtataatgatttcttctttttttttttttttttgagatggagtcttgccctgttgcccaggctggagtgcaatggcgtgatctcgactcactgcaacctccgcctcccaggttcaagctaatctcctgcctccacctctcgagtagctgggattacaggcgcgcgccaccacacccagctaattttttgtatctttagtagagacagggttttactatgttggtctcaaactcctgacctcataatccacctgcctcagcctcccaaaatggactacaggcatgagctaccatgcccagccaattatttcttttcctttgtgtagatagccagtaatggaattgctagatttaatggtagttctatttttagttcttgagaaatctccatagtgttttccatagaggttgtactaatttacattcccatcaacagtatataagcattttcttttttcccttttcttgccatctgttattctttgtctttgtactagtaaccattctgactggtgtgagatggtatctcattgtagttttcatttgcatttctctgatgattactgacgttgagcattcttccatatgcttgttgtccatttgtatgtcttcttttgaaaaatgtctattcatgtcctttgcccacttttaaattggattgttttttgtgttgctgaggtgtttgagttctgcatatctgtagctattatttaatctttggggttctgtgtgttgtgtgtggtgaccctaaagaccagacaggaaggttctcagacttcctgagagcaggcagatgtcaggaccctgtggatatctgaactttatccagtgtctgtgctcagaggcctgtggactgtgtagccctggacagttcacaaagcccatcaatgtatggggctgtatttaacctcccacgtaaggatgcggagtcaaggtgtgggtaggtcgtggtttccttggagtcagcttccaaattaaataccagaggtgtggctttatcccagtttttttctacccaaatgctgttggtttcattttagtgcagccaccagaaataatttttgcatcattttctttttctcacaatgtcacatgtctaagaataatcctatgtttgaatatttagcttggtttcctaatcccaggtataaaatctggttttgctgtcctgaggagcagtagaaagaagtccctgcatccacctcagtaggtttacatggagatagaaaatgtcatcatgtttgattatttggaccttaccttgtagcacttcactcttgaggagggaaatcagatctctggtggttggtaaaatctgctgaagaattcaccttatcatgattttgttttactcacagaatcatgtcaaccctgccatggacttcacgcagactccacctgggatgttggctctggacaacatgctgtactttgccaagcaccaccaagatgcctacatccgggtaagcaagaagccccttttcagatattgtgtgtttcctactcaatgttaatttcaaactcacaaatacggagggattacctttagatgagtgaccccatattttctgtctttcttagtaaactaaaaaaaaaaaaaaaatcagaattaagtgagatcaatcaggggactgaaatgaggattttaacttttaatttttttatttcgatgacattaaaaaatacggtagatactaggaaaacatttcatatagtccaatattgaattatgacaaaaactcttaaataacaaggaacaaaaatgaactacctaccaaaaacttgcatgactccaaattcagaggctgttgagtctgacactggaggaacaataagataaacagaaacaaagagaaaaatgggagagatggggaaggcagagaaatgccttcttacatttcacgtcagactcgtcaaattctagtcacgaaggtagattaatttgtgggtggagcagaaggaagtgggggactctattttctctgtgaaatggaagatgccacctgctgaagatgccatccgctgactgggcattgctggcatggagaataaatgaatggaagcctaaggcgacagtggtggagaaggctctcatctatcagggctgctcggttggagccctggatttgtgctgacacctctcccctgtcctcagggtgaagaacccagattcagtcaggatgaggtagatccaagattgagatcagggaaggatatgaataaatggggcaggggaattggtgagtggttaaaatgatgactagatgtaagcttagaaagtatttgatgaacaagttgcctaaatcaggaagagtaaggctgaacttaaaatatggtaagagcatgtccattaatctcatattctctgttggattctctgtagcactggctccctggagacctgggttcgagcctggcactatcatcatctagtgatgtcagtgtgggcatttcctttggtctggcctcatgtttcctctgtaaaccagagagacttgatggttcttagctgggacagtatttattcccctagagagcatttggcaatgtgtgggcgtgtttcttcagttgtcaccatgcctagtggtgtgctactggccaaaatctgtaatctatgggaccgtcggcacagtgaaaaactgtaccacccagcagtgacctccttgaataaggccatgccagatcactgagttctctttaggaaatatattttaaatctgtgtgttgttctatatatatggagtttgggaagctttgacctattctgaaatattatttgtaatctgaatatatagagaattttattgtcatttctctgaaaggtttgggatcaggtgtttggtcagaaatacagtcccacataagaaaattgtttttccataaaactttggtttgacttatatgcgaatatattttttgcacagatgatttctaataatgtaatctgcttttgtagtaagtaaattaatatttttgagataccatgtagtatagccttggagagttgagcgtgaaaagtagaagctaagtagaaattgaatttaccactaactgattaatgttcatggatgagtgtttctaaaattggagcttattgatgctgaatgtattgttaattgcataagaagcatatgtctcatgaaaagtaatttaatgttttaagcctgttttcctcaatgtgttctttaaacattgtaagtgaaatgaataccatggcagcctgacaaaactttatatttgatcaggacttaaaagaaaaaacctatttgtaaagagaagtgtggcttttggtccacatgcacttttctttattggttagactttcctgtatctcagatgactttgttgatttctcagaagtgtcctttccctaattttttctgtgtcccatttgactttggggcatttactagatagaaagctaaggctatttatgtgaatgcatggggttagtagagcatatataaattctgaagatctctgcaaggaaattttagggtgactttgacaatagatatctccatgatatggcagtagtgctgtaggtagtgaaaatagtgatctgggcagctaattaaattttgattcatgagctcaatggtcttttctgaaacataaagatgggctcaatcttttcaatttgcattttgataaaaatccgcctttttgaggatgtatatcttctctatgaatgcagtttttcatttattatttatatctttcatttgataaatgcttattctgtacctgaatatagcctcactattcactctctttgccagtcagatttatagttgagattaaaaaaaaattgtaacacacacacacacacacaaacacatgtatatatgcacaaatattccctcgttgcccttgtcactcccaggtatcatggtccctcacccactttctagccatatgttcccaagttgttttttgccctgtgttcaacttgcctgccactcacttttcagcatcctgctccaagacttctctccattgctttctggaagctgtattgccaaatgcagagcactttcctcatcctttgtctcgttggccttgcccttgacacctgacactctctagtgaccagtcctctcttgcccagcagccagtgatctgtcttggctctgttgctgaccgttgctcttagtctctctggcaggtttctcctccacctgcccatgaaatgcacaggcccccaggactctgtctctggacctttgcttgtctcagtccctcaggctgcacatttcctaagtaaccatcaaatgcccagccatgagccaaaggatggggattcctcaagaaaacaagttgctcatgggtcctgacattgaggagttcactgtctagagatcaaaagtagaggtggtggtggtggggtggggggtgaagagacaaataccaggcagtttccaagtcacttgtcatgtgtcttgattgagtatgctgggaacacagaggaaagtcaccaacacagatgtgggggtcaggtcaggaaagcttcctggaggaagtgacatctaggctcagaactgttgaatagtactagttaactaggtgaagggaagagatggagagtactacctcatgtggatggaaccatgagagcaaaggtacaatggtgcctgctttgttcagggagccacagtagtataggatggccagggcagggactggcaaacggggcatggcttgtgaggcaaatgtgctacttcagtggggatgtcttaagccatctgaagaggtctgttggacctaaaggcagtgaagaatttctgaagtgttttaaatgaagatgagaattaagtttagacaaatcactgtcccgctagaaaaccaatgtgagaaatcaagaccagaggcaaaaataaaatgtgggaaattatagagaaatggagataacttgaactagggtagtgggagtggcaatgaaatggagcagtttgaatgagttactttggaactaaaatcaacttgaccttctccgaggaagagggaggtttctgccttgagtgggaggtagacagtggtgccattaaggaaacagataatgcaggtctgtgaaggggcaggcatttggaccatccagactcttacatgcatgtgggacatctgtctaggaggacatatgccgtaggcagtgagatctgggtggctgagctgagacccacgtagacatcacaatctatattctaactccttaagcattcttattccctccaattcattcttctgtattgtcacaatattatcttagtggcctccttgctaatgtctggaaccttcaaacccatcttccgtgccagttgctaggatgatcttcctaaagagttccgagtgcttcaagggaccatgcctggcccacagcctatctctgtggctttatctcttgctaccaacttccctttccctctttccatccccccaccaccatagtagcctttgtctatataaatgatggtaggccaaactagccaggcaagtctctaccactgtgtctttgctcccgttcttgtttctgcttgagtgcctgtcccacatcatgtgcctgttggacagccctcatggcaaaggccatgttctgtctgaagaagacttcctgaccctctacccggatgactccatccactctctttgcaccgtggacacacaatttaaatcctagaacattgtacagccttaaatgtatttactttctatttcccctaattgattgtaaatgtcttgtgagcaggcaccaaggttcatttatattctagcccctggcacagagcctagcacatagtggcttttaatcatttcttgtaattcacatgagtaaagagctttttttagttctggtttaaatagtctcttgaccatgataaatgctttttttaccattggagaatcatggcttttgttcctcctaacagttataaaggtatatttttgatatgtgaattttgtgatggacagcctggtttctcatgttatatttgaataaagttttgtaactgtgtactgatgaaagcagtgggtgtaactgaattaccccaaaacttggacgggcacagaacatgaggaggaattgcaaatctgagtatcctactgtgcatggagtaaaatctggaggcatagcatgatttcagacttccgagtcttacttactctgggtataattgcttttactttttctagaaatgtttcactccccagctttccagaccagaggaatggtacaaggctgtctcaataaggagacaagtggagggagggttcttggctcatgcccatgagcctgctgtcattattttcagagacaagataatggtacagagttgagcgtgttgtagatgttttgtttttctttttttatgtttatgttttttgtttgtttgtttgtttgtttaagatacagtctcactcttttgcccaggctgcagtgcagtggtgcattttcagctcaccacagtctccgtgtcctgggttcaagtgattctcatgcttcagcctcccaagtagctggggctacaggcacgcaccaccatgcccagctaatttttgtatttttagtagagatggggtttcgccgtgttggccaggctggtcttgaactcctgacctcagatgatctgcccgccttggcctcccaaattgttgggattacaggtgtgagtcaccgagcccagccaaatttatgttcttgatgtatttaattttattcactgggaactactgaaaaacccaaattacctggttttagcttggctgaagacctatgctggccaatgtgggagccaagattcaaccacaaagcaggaagcaatggcaaggaaacctagggctctctcaaaggtggaactggaataataagaaatacttaagaaaaaggctatgactagcagatagggtgatctcaggataatgtaattcttcatggtaatattcaccttcccgtttggccagagcaaatgaatacctagtgtgggtttggtaacatgcaagacaggctgcatagttgagctcagtcttcaagtaatccctaggaacaagcattgttatcaccattttataaattcaggagctgggacttagagaggtacagagagtttggtctgtcaaacagccagtagacaagcctccaaatctcaggcttcttccagttctgtagcctcgtctctgggcttggagtatgatgagggaaacagtgttgtcattcttggaatggagggaaaggggacagagtcaaagagagaataattagaaaacatggaaagtccacaggactatcaaacaagtcgtcatattcagttaaagatcttctgaagtctagcatggtcaggaagccatttctaaagatacttgattgacacccaaaagatgctattttaaggaataagtgggcccagggaaggtatcattgcaaagcttttcatgtgtcagagatagtctttagtttcagagtagtgataggagaagtaacatgcagaagtattcagatgttcagaacctattgtcagtcatctgacccctcttggcattacagtgagacagaagcaaactgtgcattaatcccaggctctaaaaaagttagataaacatttaacgcccaacaataaaatccgaatgcatgcaaatgagatgtttctattattgattacatctttttcagagggaaaaaatacacatagaaaacagaaacagtccatcttcttaggcgctaaaaagtatccaactaaaagaagaaaaatccttttaacattcatattcattcattcattcattgactttttcatgaaatattatcaaacacctaccacgtgcctgcgtggagccatgcgcagtggctgtggtggtgaagaaaggcaggatctgattctgaaatacctgacatggaaaagcaatcaagtgaaggcagtatttgtttatttgttttttacttgagagtttccttgtttcctttgggatttttagatgtgacttatgctgggcacaactatcaagttataaaaacgttgcttgatacttctttgcagtttttcacaatatattgagcaggtaaatatttcattattttgtaagttattatactgtttatatcagaatcacttaggcttgccccctttcccagtgacctaattttaaacaacggcactgcttcttagagaagtattctgttgggcagtcagtatggaatagaacaagcctgaccccttttctctgtttgattcggcatggtgctatgtgataaataaaatattttcttttcttttatatatatatatatatatatatatatatatttaaattatactttaagttctagggtacatgtgcacaacatgcaggtttgttacatatgtatacatgtgccatgttggtgtgccgcacccattaactagtcatttacattaggtatatctcctaatgctatccctccccactcctcccaccccacatcaggccccagtgtgtgatgtcccccttcctgtgtccaagtgttctcattgttcagttcccacctataagtgagaacatgcgatgtttggttttttgtccttgcaatagtttgctgagaatgatggtttccagcttcatccatgtccttacaaaggacatgacctcatcattttttatggctgcatagtattccatggtgtatatgtgccacattttcttaatccaatctatcattgttggacatttggcttggttccaagtctttcctattgtgaatagtgccacaataaacatacgtctgcatgtgtctttatagcagcatgatttataatcctttgggtatatacccagtaatgggatggctgggtcaaatggtatttctagttctcgattcttgaggaatcaccacactgtcttccacaatggttgaaccagtttatagtcccaccaacggtgtaaaagtgttcctgtttctccacatcctctccagcacttgttgtttcctgactttttaatgattgccattctaactggtgtgagatggtatctctttgtatctctttgtgcttttgctttgcatttctctgatggccagtgatgatgagcatttcttcatgtgtctgttggctgcataaatgtcttcttttgagaagtgtctgttcatatccttagcccacttgtttatggggttgtttgattttttcttgtaaatttgtttgagttctttgtagattctggatattagccctttgtcagatgagtagattgcaaaaattttctcccattctgtaggttgcctgttcactctgatggtagtttcttttgctgtgcagaagctctttagtttaattacatcccatttgtcaattttggcttttgttgccattgcttttggtgttttagacatgaagtccttgcccgtgcctatgtcctgaatggtaatgcctaggttttcttttagggtttttatggttttaggtctaacatttaagtctttaatccatcttgaattaatttttgtataaggtgtaaggaagggatccagtttcagctttctacatatggctagccagttttcccagcaccatttgttaaatagggaatcctttccccatttcttgtttttgtcaggtttgtcaaagatcagatagttgtagaagtgtggtattatttctgagggctctgttctgttccattgatctatatctctgttttggtaccagtaccatgctgttttggttactgtagccttatagtatagtttgaagtcaggtagtgtgatgcctccagctttgttcttttggctcaggattgacttggcaatgtgggctcttttttggttccatatgaactttaaagtagttttttccaattctgtgaagaaagtcattggtagcttgatggggatggcattgaatctataaattaccttgagcagtatggccattttcatgatattgattcttcctacccatgagcatggaatgttcttccatttgtttgtatcctcttttattttgttgagcagtggtttgttgttctcctcgaagaggtccttcacgtcccttgtaagttggattcttaggtattttattctctttgaagcaattgtgaatgggagttcattcatgatttagctctctgtttgtctgttattggtgtataagagtgcttgtgatttttgcacattgattttgtatcctgagactttgctgaagttgcctatcagcttaaggagattttgggctgagatgatggggttttctagaaaaagagtcatgtcatctgcaaacagggacaattggacttcctcttttcctaattgaataccctttatttctttctcctgcctgattgcgctaggcagaacttccaacactatgttgaataggagtggtgagagagtgcatccctgtcttgtgcaacttttcaaagggaatgcttccagtttttgcccattcagtatgatattggctgtgggtttgtcatagatagctcttattattttaagatacgtcccatcaatacctaatttattgagagtttttagcatgaagggctattgaattttgtcaaacttttctgcatctgttgaggtaatcatgtggtttttgtcgttggttctgtttgtatgctggattatgtttatggatttgcatatgttgaaccagccttgcatcccagggatgaagcccacttgatcatggtggctaagttttttgatgtgctgctggattcggtttgccagtattttactgaggatttttgcatcaatgttcatcaaggatattggtctaaaattctctttttttgttgtgtctctgccaggctttggtatcaggatgatgctggcctcatgaaatgagatagggaggattccctctttttctgttgataggaatagtttcagaaggaatggtaccagctcctctttgtacctctggtagaattcagctgtgaatctgtctggttctggactttttttggttggtaagctattaattattgcctcaatttcagagcctgttattggtctattcagagattcaacgtcttcctggtttagtcttgggagggtgtatgtgtcgaggaatttatccatttcttctagattttctagtttatttatgtagaggtgtttatagtattctccgatggtagtttgtatttctgtgggattggtggtgataccccctttatcattttttattgcgtctatttgattcttctctcttttcttctttattagtcttgctagtggtctatcagttttgttgatcttttcaaaaaagcagctcctggattcattgatttttttgaagggttttttatgtctctatctccttcagttctgctctgatcttagttacttcttgccttctgctagcttttgaatgtgtttgctcttgcttctctagttctttaaattgtgaagttagggtgtcaattttggatctttcctgctttctcttgtgggcatttattgctataaatttccctctacacactgctttaaatgtgtcccagagattctggtatgttgtgtctttgttctcactggtttcaaagaacatctttatttctactttcattttgttatgtacctagtagtcattcaggagcaggttgttcagtttccatgtagttgagcagttttgagtgggtttcttaatcctgagttccagtttggttgcactgtggtctgagagacagtttgttataatttatgttcttttacatttgctgaggagtgctttacttctaactatgtggtcaattttggactaggtgtggtgtggtgctgagaagaatgtatattctgttgatttggggtggagagttctgtagatgtctattaggtccgcttggtggagagctgagttcaattcctggatatccttattaactttctgtctcattgatctgtctaatgttgacagtggggtgttaaagtctcccattattattgtgtgggagtctaagtctctttgtagtctctaaggacttgctttatgaatctggtgctcctgtattgggtgcatatatatttaggatcgttaactcttcttgttgaattgatccctttaccattgtgtaatggccttcttcgtctcttttgatctttgttgctttaaagtctgttttatcagagactaggattccaacccctgcctttttttgttttccatttgcttggtagatcttcctccatccctttattttgagtgtgtgtgtgtctctgcatgtgagatgggtttcctgaatacagcacactgatgggtcttgactcattatccaatttgccagtctgtgtcttttaatcggagtatttagcccatttgcatttaaggttaatattgttatgtttgaatttgatcctgtcattatgatgttggctggttattttgctcgttagttgatgcagtttcttcctagtctcaatggtctttacaatttggcatgattttgcagtggctggtaccggttgttcctttccatgtttagtgcttccttcaggagctcttttagggcaggccttgtggtgacaaaaatctctcagcatttgtttgtctctaaaggattttatttcttcttcacttatgaagcttagtttggctggatatgaaattctgggttgaaaattcttttctttaagaatgttgaatattggctcccactctcttctggcttgtagagtttctgccgagagatcagctgttagtctgatgggcttccctttgtgggtaacccgtcctttctctctggctgcccttaacattttttccttcatttcaactttggtgaatctgacaattatgtgtattatgtgtcttggagttgctcttctcgaggagtatctttgtggcgttctctgtatttcctgaatttgaatgttggcctgccttgctaggttggggaaattctcctggatgatatcctgtagagtgttttccaacttggttccattctccccgtcactttcaggtacaccaatcagacgtagatttggtcttttcacatagtcccatatttcttggaggctttgttcatttctttttattctttttttctctaaacttctcttctcacttcatttcattcatttgatcttccatcgctgataccctttcttccagctgatcgaattggctactgaagcttgtgcatttatcacgtggttctcatgccatggttttcagctccatcaggtcctttaaggacttctctgcattggttattctggttagccatttgtctaatctttttttgaggtttttaacttctttgcgatgggttcgaccttcatcctttagctcagagaagtttgatcgtctgaagccttcttctctgaacttgtcaaagtcattctccgtccagctttgttccgttgctggtgaggagctgcgttcctttggaggaggagaggcgctctgatttttagaattttcagtttttctgctctgttttttccccatctttgtggttttatctacctttggtctttgatgatggtgacgtgcagatggggttttggtgtggatgtcctttctgtttgttagttttccttctaacagtcaggaccttcagctgcaggtctgttggagtttgctggaggtccactccagactctgtttgcctgggtatcagcagcggaggctgcagaacagcgaatattggtaaacagcagatgttgctgcctgaatgttcctctagaagtttcgtctcagaggggtacccggctgtgtgaggtgtcagtctgcccctactggggggtgcctcccagttaggctacttaggggtcagggacccacttgaggaggcagtctgtccattctcagatctcaagctgcatgctgggagaaccactactctcttctaagctgtcagacaggcacatttaagtctgcggagatttctgctgccttttgttcggctatgccttgccctcagaggtggagtctacagaggcaggcaggcctccttgagctgaggtgggctccacccagtttgagcttcccggccactttgtttacctactcaagcctcagcaatggcgggtgcccctcccctagactcgctgccgcgttgaagtttgatctcagactgctatgctagcaacaagcaaggctctgtgggcgtgggaccctctgagccagacgtgggatatgatttcctggtgtgccgtttgctaaaaccgtcagaaaagcgcagtattagggtgggagtgacccaatttcccaggtgctgtttgttaccccttcccttggctaggaaagggaattccctgaccccttgcgcttgtcgggtgaggcaacgcctctccctgcttcgggtcacgcttggtgcgctgcacccactgtccgacaatccccagtgagatgaacccagtatctcagtttgaaatgcagaaatcacccgttttctgagttgctcacgctgggagctgtagactggagctgttcctatttggccatcttggaacctggaccccaaatattttcttaattaaactgctacacaaccagttgataaaatcctactcaacaaagctgttacccaacggaatttgtataatcttgaggtttccaggaaaaaatttaaaagtaaatcttggaaactgtttgttccttacatatctggcaattcttttttgttttctagttttatcgagatataattgcttacccaaaaaatcacataattaatgtatacaatctggagacagaaccttgcttcagcgtccctcataatttatgattaacatttcatctagttggaaaatctttgcatactggctgactgttatagaagataatgaatttcctgaggggggagaatagaaatgcctttaaaaataagattaatcacaatgttttcgtgcagttgtgagacagagcatatatatgtttctaatattatgccaaatcagaagacaaatatttgtaatatgtcaagtaaataagtctatgagtaaagatggctatttctactgaagaattgttttctcaagattgtttcattatagccacttttttaaacagatgaagaatttaaagtatgtttagtttacactattttaaaacctttaagtgggtttttcctcctcatgatgcaatgcatattacatcatacttacaaaaaatagttgggagaaataatgatttagatcctaactaatggttgggacagggaggcctggattttttgaggcagcaacctaaagaaaatgctctgaaattacctagcgtgagaaaagctactatcttttgagcctttactatgttctgagtacttaacatacattatttgtaatttcccttcaatgttcccagacatgggaagataaagaaaccttatgccctttccttccagtctgtagatctctctgttcttctcctcaaggcccacctcaagttcagagtcattttggggaatctcttttcagcctttccagtcagggagctaaacatcaatgatcacagcaatcacatgtttggagctcactagaacaactaagctgagtattttcatttatttcttgcaccacccctctgaggttgccactgttactgtttgcattttacagacgaggaaactgacacatggagaggttaagtggtttgtccaaagtcacacagctaaggtagtaccagagctgaattttaaatccagataatatgtgtccattgtccatactgtgtgcttttgagaggcttatagattcatatggaggtggtagccacagttcaaatgagtcctacagatgtgttttgcttcactgacccagtgttattaaaaagaagagaatttgattgccttttttcagggcttacactccctccccaattaacttagagccccagacaccttcttgtattatggctgactgcttcatgctttctggttatctgcctggtacttgaaggcactcgagttagtgcccgttgatgatgatagtctgtaataacatttgtgaagttctgagcacaccgccagcacatagaaggtgcttcaaccatttgagttgattgttcccgttcccactccttaaagtagtacttgattgatgtacagccttctgagagtttcatatgtatttgctcggtgtttatcttttcatccttgtaaactcccagaaagcaggcatttcatctttggttgggtgtttattccctggctgagaatgaaggactttaatcccaacctcctgagactgaagaaaaggaaaaggcatgtttcccagtttctcctgttgtgagttttaaagaaaaaagtcacacgagtatattataaacagactgcactggaccagtgctctgggagctctgagcatcatcagccctctgtaccaggagtcagaccatagagtggatccctcgcaggacaacagtatgcattgaagggaacaggaaccaagtagcctctgtgcattaaggcagggtgctggtggaggcgacgccaagactttaaaataaactaagggacttctaacatttcaagggggaatttggcggttccccaagcgacataattacaggacagtgtgtaatgtgcaattaaacttaactatgaagcaaatgattggaataatgcttagtgcacaacagttttttgttcccattgtgctgacagagcctccccttctctcgtccctgaaatggcttcaacagcaattgctcttcatttttttaaaaataaaattatatgttgccagttaaacacacaattccatgtaaaggaacctttttttatctgagtgacatttttcttctaggtgatgtggagaaaggattcagtttagaataacaaggaccccaaaggcacagccttgttgggacgtttgagtttgaaatgattctttgtctcataattcatttacttttttcctggctttaatttttgttctttctttaaccaaggtccacagcttggaggcttgtttgtatatacaggattttttcatgttttaaaaatagtggcattaatttcgttgattgtgaataaccaagctgttactgccaaacaatcgggaccccttgagagtgtgaatatgtgattagatttactaattgagctggaaggaagaatttctgacttccaaagccagtgatttgaatggaatgcttcaagcatgaggatgagatcattgttaaatgtgggcttggttttatctcagaagaccccttgtcccagggagggagggcagattccacaaacctctattagctgactgtagcagtgcctgcgtggtgtgctcacaccacctcggatgctcacctgtgttcttgtggtgctggatgaggtgtctgaaatctgaagcagacctgaaagctggtagttatctccttgtctctcttggtaccaccccaagctgagcattaggttcagaatgcttgcttgtttgtttgccgttgtctcaggttaactgaaaatactacagcattgcagaaaaatccaaacagctccacgtggtgttttgaaatttatcccaactgtaggctgagtgacccgcaggttggacagtctgtgaaagccccaaagtctcagtgtttcctcagtgtcaggacctactttagtgatctccaggtccagggctaagatctcaggaacataattatctctccttttttctctctcttcctcccacaacttgatggagatgcctctcactgggcctctccaaatatcctccatcagatgcaggatgtagcctgccctcttgttgcggagcttcttgccagagataatggtgatctccttgcccacacactcgttcctgtggaagtcattgccgaggcacatgtagtacttttctaggatgacccaggctgcctttccatggttttgatgcaaaagcagcccatcttggagagtccttggtgaaagaggtttcagactttcttacttagcattctccaaaggttttttgttggtggtggtggtggtttttctcttttctttttttttttttaattttaaaacacagtgggactttaaaacagtgatggatttgttgagaaaaaagtgaagctaagctgtatagtgaactatatgtagttgacatattgtaaacacaagtctaatgtgaattgaaaggttaaaaacttcagaaggatcacatgttcctgactccctcactgaggtaccagccaagacttagctcacagtaactgttgtggtttctctatcttagatccagttagtatctttccattatttctccaacccagttctccaaattcagcccatattgtccatttttatgtcttgtttagctagttaaatatttattgagtacagtacctgctctgtgacaagccctctttctttctgctgtaattgaccaagcttccacctttaaatgtgcatttttctaccttagctgtgcagagctcagcagctgctgtgctggggtttcgctatttcttctcccttttctgctttaattgttgtaatgcaggagttcaaagaactgcagctcacttcttatttctttgaaggggaaaggtttctgggactcctctctcttctgtttttctcaagagaatgcagacctctctgcctttttaattttttaattaatagacattgtgttttagaacagttttaggtttacagaaaagttgagcaaaagtacagagggttcgtatatatcccatctctcatttctcccacacacagctttctctgttattaacatctcacattagaatggctcatttgttacaattgataagccaatatcttgcagtcttgctgtaattgtttattagttccaagattttatgtattaattccttggaattttctacatagacaatcatgtcccctgtgaacaaagacagttttgtttcctccttcccagtctgtacaccctttttttttttttcttattgcactagctaggactaccagtaagatgttacataggggtgataggagcgaccatcttagccttgatcctgatcctagggcagagtcaagtttctcatcattaagtatgatgttagccataagttttatgtagatgttctttatgtagctgaggaactgctctattcttagtttgctgagagtttttttttatcatgaatgagtgttagattttatcaaatggcttttctgtatctattgataccattatacaacttttcttctttagcctgttgatacaatggtttacattaactgatttttgaatgttgaatgagccttgcatacctgaaacaaatcctactcggttgtggtgcataattctatttatagattgttggattctatttgataattttgtgaaggatatttacatttatgttcatgagagctatatagatccgcattttttttctttcttatgcctttggttttggtattagggtaatactggttttatagaattagttaagaactactccttctgcttctaccttctggaacagattgtagagaattggtatcattttcttgtttaaatatgttatagaattcaccaatgaaaccatccaggcctgatactttccattttggaaggtcattaattatttattcaattcctttaatagatataggtctcttcagattgtctatttcttcttgtgtgggttcttgtagattgtgtctttcaaggaattggtccatttcatttacattatcagatttttgagcatagacttgttcataatattcctttattatatacatgagatccataaagttgactcttctttcatttttgatgctaataatttatcattttcctttcatcttgttgagcctggctagagatttgttgtttttattgatcttttcaaaaaactagcttttgattttactgatttttctatattgctttccagttttcaatttcactgatttccactccattatttttttttacttcttttcttcagcttactttagatttaatttgtatttttttagttttctaaaatggaagcttagatgcttgattttgtatatttttctccattgcttgaattcctcattgatattttgctacaaatatccttctagcaatggctctgccttccataggggttcagcatggctaaacctactcagaactttgctatttaactgtttcatggcgctaaatatgggttgccttgataaggcaacccagtgactaaagtctctggctcaatgagttactctttattccattaagacccagttaccaacaaactaaccccagcaaattctatttactctactttcaatcctattgactctactttcaaaatcctattgactctgctttccagaaacctacctcctttccccacttctaccaccattacagtaatccagtacatcaaacctctctcctgtatctcctgtaatagtgtaacagcctctgattgatattgcctgctcccacacttgctcatcttttctgtcttcaacacagtagccagaacgttaggaaagatgccatagtgattcttccagtattggtcagatcacatcactcatctgcctacaacctccagtaactcagagtaaaaacgttcagcacttttgccacagctctcaaggctctgcagtgttctggctttccagccttacgtccttctatcctactccttcctccctcaactccacccacagagatcagctagggctgccataacaaaatatcacatactgggtggcttaaactacagaactctattttctcacagctctgaaggctggaaatctaaaatctagctactggcagggttggtgtctctgaggcctccctttttggcttgtaaacggctgccctcttgctgcctctccacatggccatccttctgtgcactcacaccctgttggcactgcttcttatgagaacaccaatcatactggattcggaccctaccctaatggcctcatttgattttaattacctctttaaaggccctatcttcaaatacagtcacatgctatacagcgggttggagcttcaacatgtgaattttggaagggtgcaattccgtccatagcacccttgttggccgtgaacataccaggtacctctggtctctgggccttttactttttgctttctctcctaggaatctgttcctgggtagccacatggctcattgcctcacttccattagtctctgagcagctttctgtcacctccagatataaagtactgatttcatcctcttgctccctgtctaccttacctcctttatttctctcaaaatttaatgtttcttacatgctcgatattcactgttttctttatttcctgttcacccttactagccagcaaacctcataaaaccacagagtatccatggtgtcactgcggtaccccagtgcccggggcagtgccaggcacacagaagacagtcagcacatatttgttaaatgcatgcctggattgagtgagtggcaggactctgcccagagagttctggtgttccaccttttggcaggattcaccccatggatggaaaccacagaagtagatctctatctggaacacgctctaacctctctggatgcagctgcctttctggcctttgtccgtcctggagtgaaaaccaaattagaaactatatcggtatgccccaaaatggccttgccccagatatgctgatgcttgggcttgggtgagtcactgctgtcttccctttttgaataggattcatgtgaccagagcccagccagtattagcaacctgcctaccaaatcagaagggattttgtattggtataataaaatttaggtggtaatgttcccaaatgtccctttgtattagttaaaaatagcttcccccttaggaactatgctgtacacctggtgcacccagtagtggttgacattgtcagataattttattttttcattgaccttaattttatcaactttttccctgcactggtaaaacccaaggttccaaaatttggcatacatcataaataatagacaatatttttcttgtattttataaagcaactgaaacaattttaataacagatataacaaccctaacaactaacttctctttggttggtttatcaaatgctgctctgtaacactggtcctgatacctggagacttttcaaatctaagactccggttaatgtcattcacacctgtctgcaaacttgcatttgccaagatcaggaaggccagcctagccaatctttcagtacttgactggtgatgctcctatgccacagggctcttgcatgtgcttattctgctgactcagctcctgctttctccatcccttccctgcttgcccacttatccctggattaatcctgcagaacctcaccctttaggctcctctttcattagttttgcttccatgtcactccctttatagcacttagtttggaattatataatcgtatgttttactatttgattattatctctcttaacatgaaatttttgagcaggaaccatctcttttgccctatgcccttactttctgtcactggaccatctaaattaaatgaatgatgaaagataggatgtgttgaatctctgaacagggttgtgttcctcttttttccccctctgaagtcctttatggccttaagtgatatttttcagaagatcaaaactgaagcataacttggaaggaatctctttttccttgacctggtgggaccatcaaattgggcagagtttgagctacacaggataaagccttacaacaaatctcagttatgaaagccatgaagatgtgcatatgttccatgagcagacatgagttctctataagccaatgatgaagaagaccaacatttagttagttttcaacagaagggtcagttctgctgatagcttggcagcttggggctctactctgcatatggtaggaacaaaaagaaagctaaactatattgagtagtgaatgtttccaggctatggttatgaacattttatatgcattaccttattgaattctcactatcattgtacccattttgcagatgagagcgctgaggctcagaaaggtcaagtaaattgcccattgctacaatagatagtaagttgcaaatggggactttggacccagacagctctggtggtgactttttaatactttacattgaatttggtagtatgctagtacaaaagtttttcttaaaagaaaatctgattagtattgcagcatttgctggtttctgtggtatcaatactcctgctgtggccgatttcaagctcccaacagtctatggcctgtaagccttttgaaagtgatgcagcagctggttagcctgctctagcaccagccactggatcttgatggtgcttttgccttctcatgcattatcccatttgctcttcttagcaatatgagggactgtggaatgggtgaggttaacttacgtgtgctgatcttttcaatgggtgagtcatgtgtccagtccataatgccaagtcatggcctgaggtgagaaacactctcttactgactctctcagggcaggagcctgcagagaacgcagagctggaccaagagccccaaggaacctactgtcagaatggctgaggtacaaacaaaagaggatctggacaggaagagagaggcccacatggtcctggggcagctgatgctggtagaatgtggtggtaaacggggtaggagaatgaagtaactgagagtcttttctgaattcagaattttcttaattctctgaattcataaatatgtatttgatgtaggaattcttccccaaagagcttaccaaaaaatcccctacgctcaccaccatacccagccatgcaagggtgcagctgcttggaggagaggaaatcctggattctttcaggattagggagtggctgtcatggtccatggctggggagagccacagcatggggctgattgggaaagtctggggggccccatagcccctttcttcttccatcagaggagactgtggatttttctttcccatgataaatctaggtgagccggtgaaatgattttaaagggaactcctccattgctttgggaagtgtgaaatgacatcatttttagattatggtttatcaatacttatatatatatatttaaattatactttaagttctgggatacatgtgcagaacatgcaggtttgttacataggtatactttaagtggcagaaatgctgagaccttttgacttaacgtttatgtttttagaaacgtacttaaaataaatcattttgcaaatcagcgtaaaagttgctgtgtaaggatgtttgtcattagctccagtcaggtgcagatgtgaggacctctgggcagaggtaggggacctggagatgaagctgagagtgaggctggtgttccctgggcacctgtgcagatacaaatacagccaggcagctgggcctcttcgccttggcaggcttaattaagcacattggatttgtgtccttgtatttcttaaaaaaggaaagaattctgaaatgaagaaaaaaagtagcctttttggcatgtaacatctgcgagataattaatctccctgatatttcaacactgaggctgtttatcacggaggctgcttgggaaccaagagcagccagcctctctgcagtacccactacatacctcatgtggcaggggaggacctggttcatcccagagggcaatctggaggcggtcaaggttgcttcctggtaaaaaccacgagcgttcattgctgtggcctgcaacactctcttcccttttcagttcatatcatcagaggtctttgtccattgttgaggaattaagagaaatgtcccatgcatcttgttctgaagaaatatatttgagtctcttgctttccactttttacttttcacctgaaagcgtccaagagttaactgagaggcaggccagtcttcaggtggggaagaccgggtgggtgttgaggcaatgtttccagctggaatgggggacttggaatcagaactgttaaccaataagaatgaaggggaaggaaatcctattagggggcgtcatcacctaggaaacacgagtcagtttccttttctgcactccaacatggaatgctgagcctggaggccccttcacagattgtcccttctctgttccccaccctcacactcccggatcccctgggccttatctggggaggggggcggcggaggagtgcagagtggaggcagcgcgtggggtgtgtggaagggaaggggacattcttttgctgtgggagttggctccctctcatctcatacattttcctgctgattctcactcacagcatttacaggaagcatttatagcaaatacttgccaaatgttttccataaacacacaacgaaggacatttttcacacattccaatgttctgtaaatgtttattttcacaatacacaaagaaggttgagtgtatggttttcctaaacaagcctttgaagtgtgggctttggcccagggagatttgcttctgagtgttttcatccacgtggccgcattgtccctgggggcacaccaggcacatgcttcaatgcagagagtctccaagtgagttttccccccagcttgtattctctgtgggaatacgtgccctgaatgctgagtagcctctgggttctgagcctcctcctgatgaagaaggaagttagaggttctcagtgcatcacataaacccttgcttctgattaaatccacaaatgacatagaatagggaatatggaggacagggatgactcacttaagatgcatttgaacatatagttgtaataagttatggaaacactcatgctaaagccaggcaagttggtattcatgtaagggatggagaaggtgactgaaccttctgtgggcactgccagcctcaccagaggccagagtcatgactcgtactgtccatgcacttgttcaataactgcttcattactgagcacctactgtatgtgcaactctgctgcaatgtcagagattcacaagtgaggaagtggttcccaacctcaaggggttgactctatcagggaaggtaagacacctatactttaccataatttgggggcataaaatgggaattgttttaagaaagatacagataaaaggttatctcacttgggagaaaactcacttggaaagtctctgcaatgaagcctgtacccggtgtgcccccagggacgatgtggccatgtgaatgaaaaaactcagaagcaagtctccctgggccaaagcccacacttcaaaggcttgtttaggaaaaccatacataaggttttattgcataaggttttatggagaaagtgacatctggattgggtctgaaggagagggaaaattgagacaggtgtgggaggggcagtgtgtcagggaggggtgtcggggaggcagtttccctaggagggagccatgtctgggcctagcctggtaggagagctgtaccagagggagatccttcctctagcaggagtaggcaagatttatgattcatacacagaatgagatgtgatgagatgaactccatttaaaaagctagatgtaataggaagaaaatatttccttttcacatgcttttttaacctcaagtaaaacaacttatggcctaatttcttaattaggtttcagtcaattttttcattgcagctaacttgtcatgtgcataatcagaaaattaacattttctgtttgataatatgttcctgaaatggccaatttattatttgtccagaagaggatagtaagaaatagttctctctcctcacctttccatcttctcaagtccgttctcccaaaccagagtgaatttctaaatcaatgtgctaagtgagaaagtgaggtgagtgggagctgacttagacagattcattttatcactagctttcctggaatgtgtttgttttgtaaaatgaattatattcaaatatgtttcagacaatatatgtggtggttaactttgctttaagacagcagtaactgttcagacaatggtgacaatttctcagtaagaagtcagggttgagaaatgtcaagcttaatttttcatccaacagtgacggtcagacaaaagccaaacctcttggtatctttgcactccggtgaaggagatgtgaggcatttgtattcagtaatgtaatgttgagcgagtcaaaaccctgccatgtgatcttgagatttgttgcttaatactgcccaagatgcataggggcttctctgcttttattcagcatccattttcccattgtaattagtctttcttgcattccacagctcacttctggtgtggaatgttaaaaagatgccttaggagagagtttgacatcagtttcttcttcaaggttgaactcaaggctcaccctctccatgaagccccgtctgcccattgcatctcatgtgcaccttcactgcacaaagtgatacttccttgtgaaaaatgcaaacaatatagaggtacataaaaggaagtgaaagttggcccatcttacaaatcccatgtccttgtatcttccaagtagattgcaagaccctcaaaatggacttttgttcatacatgtatttttaatatctagcaagttgctcagcaataattgcttaaaaatattcatggaatgaatgaattggtcaaagggtaatacactgtagggatgttgggaaggactagggctagaattcagctgatagtttggggaagcagtgccttgattttcaaaatatggaccctggacttgcagcgtcagcatcatctgggagcttagaaatgtgggacctcaggtcccaacccacacctactgagtcagaatcttcattttaacaaggtctccaggtgatctgtgagtactttaaagtttgagaagtactgggattgtatatgtctgcaaagtaatttacaatgtgaactttaaaaaaaattacaatgaagtgtgtgtggtttgcattaaagagtatgcagtagaggagttctgccttaatgataccacaggactttgtaccaatgccacactttgttcccctctgtatgacagggcacacccaatgccctgtccttggctgtcctgtaggactgtcatcctgagccatttcaacacctgtagtgtcttcgtctatttttgctgctttaacaaaataccctagactgggtaagttataaacaatagaaatgtatttcttatggttctggggactaggaagtccaagattaaggcatcagcgggcttggtgtctggtaagggctgtgctctctatttccaagatggtaccttggcgctgcatcctctggaggagaggagcatgatgtcctttcatggtagaagggacagagggcaagtgagagcctcctttcaatcacaggcccttttataagggtgctaatcccagtcacgagagagaagccctcatgacttaatcacctcccagaggccacacccttaatactgttgcattggggattaagtttcaacatgaacttcggaaggggcaccatcattcaaaccatagcagtgttccttctaaacagcacgcaacttgtttaagctctaaggcatggcttcctcatctgtaaaatgcagtcctgcttcaatggcttgtgaggaccaaatgagctaaacgcttgagagtttgcacatgataatcatctaatatgtattaactcttttttgttaatcgagatgaagtgcatataccataaaattaaccattttaaagtaaactgttcagtggcatttagtacattcacagtgttgtgcaatcactacctctatgtagatccaaagacatgatcatcatcccagaaataaccccatacccgctaagcagtggctccccattctcacttctcagcccccggcaaccaccattctgccttctctctctatggattttgactcttattaatgatttttttattagtcacaggaaaaacaaaacaaaccaaaaccaatcagatttatttcttttttgtctactttcattgctttgcatgtctttaaaaacaaaaggtttgctaatgatggaaattgggaatgtagatgtgacagacctgtaagtcagtggttcccacagtgtggtccaaaactggcagatctgtgttaactgggaacttgttagaaaggcagattcgtgagtacaccccagaatgtctgatcataattctgggggtggagtccagcaatctgcattttaataagcttttagaggattctaatagaagctcaagttagagaactattgctttaaataaacctggagtaaagcctacaggtgccccctacacctgtacccatccttggggccaggaacacatgtactggcataaaaggggagattttagcctaccttctttggtggggaagtcagctgggggattgcccctgatacctcctggcctttgaatagtcagcagagcttggcttccctcagtaatgttgtgattactgtgtaggcacaaacagaagtcatcctgctgttatttaatcctttgccctctttgtgctacctgaggtgatgctcaaagggagggcctttcggcaaaacgtggctttgattgctctgtgtgttttgcgcgtcctgcttttgttgcactatatcaaagtgcagggagcatttctttttggttgattaatgttcaatttgaggtctattatgaagctccaggctttaattactataccattacccagtcaattccttgccattttatatttatggcctttattatgcctctgtatgtgcaattgcctaattttattctggaagcatttcacctcattagctgggttttataccattcctctcatttgtccagattgttatttatcttggttccctgtgtgcgttttcttttctttttttttttccaccagtctgactcattatattaatacattctttttctccttttcctgggatgcattgttatttggctcttggaaatatcgctttaagttttttgtccttttccctggtcgtcagttatactcacattcttaacttggtcatttccaaccttctgaaagcccatctcagctgcctggcagcactggccctgtccaaaggcctgaggcctccgcagcctggacataccatggatggccgcctctctctaggtgaccaattaaagctcagggaaggtgaagggatggagtttttacttaagggcatgctggtgaaagtaacttttaaatattctcttaaatccttttctaactctctctccctcaatcccctcattgtctcagaaaacttcaggacttggtttactgacttatttttgtgggttccacctcagaccttctcaatcaaaccctaggggagcctcccagcagcctgcgttcagtatgttctccaggtgattctgacacacattaaagttagaaccacttttcttttttttttttcattctgagaatgctttattttgcagtaccatataattttaacacaccaaatatattttacagtaacaattatattcttcactcaggcataagatcacctgagtttgtggatgtttctcaacaggttgttgtcgtagcatttggacaatgtgattagacaacacccggggaggtggtcatttccaaactggaagttgtccagcattattaggaacgtcttgactggaagaaaattatcgaacattagtttggtcctttctctgttctttttttttttttttttttttttttttttttttgagatggagtctcactctctcacccaggctggagtgcagtggcgcaatctcggttcactgcaagctccgcctcgcgggttcatgccatatgccattctcctgcctcagcctcccaagtagctgggactacaggtgcccgccaccatgcccggctaatatatatatattttttatttttagtagagatgggatttcactgtgttagccaggatggtctcgatctcctgacctcatgatccgcctgcctcggcctcccagagtgctgggattacaggcatgaaccactgctcccagccttctctgctcttttattttttttatttaatattttttattatactttaagtcttagggtacatgtgcacaacgtgcaggttagttacatatgtatacatgtgccacgttgtgctgcacccattaactcgtcatttaacattagataacctaatgttaggtatcataatgctatccctcccccctccccccaccccacaacaggcctgggtgtgtgctgttccccttcttatgtccatatgttcttattgttcaatttccacctatgagtgagaacatgcagtgtttggttttttgtccttgcgatagtttgctgagaatgatgtagaaccacttttctaaagagatgctaaaagaacttgaggaaacccatgtaagtcagaaatatgatttcatccaagtccttactttaccaaaaaaagcaagattaataactgctacagcaaccatgttttgttttctgtcgtgctttttcaacagcttttcccaagagcgataagaatatttcagaaatgcaaatagtaataccttggaacaagcgtttatgtaattattatggtgatagtagtatcagttgtctccatcaagtgtttgaggtgtttcaggcactaaggaaatctttacttccattttgctttcccatttaatctttacgaccctttatggataagtattccttcactcattttcatggagaaaactgaggttaagggatatgtacaaagtcaccaagaagtagactttgtctgttagaaatagatccaggaagtttgtttctgtccagagccacagtgctgatcactcctttgtgaccatgtgaaggcctttcctgctcaaagctttattactgtaatatttcaccctttctgttttcaataggaattggtaaccaagaatatgtgctttggggttaggccatctaagcttccatgctgggtctgtttatttctgtgctgtgtgaccttggaccagtgacacatctctttgtctctgtttcttcatctgtacagtgagatggcttagtattttggcatgtgctggtacacgtgtgtggaatgagacaatctgtacaaagcccttcaaagaaggcctgggagagaaatgctttctataaatgttagctgttagctgtttgttgccttttgctgccatcttgatggcatccctaaagcttttttcttttgggtttatttacttccaggtctcacttcctttctaggtagatctggtgaactagcagcctgtggttctgatctgttccattttgtttgtgtgcttggcacactttctataattttaatgttcttctttctctgctcatttaaaaccatcctattagggcttggacatgtttgtttaattctctggacttgattgaaattcatgatcacaattaacttcttgtgcagcccccttgaggcagctcagggttctttctcatgatggtcttcagttttcttgggaccaatcatcattagcattggcaccaagggagaatgaaggagaagtgactcccgagtctccataagaggaatcaaaactgggcttattctttgaccctggggtaggtctgggtcttgggatatgatctaaggactaacacttcattctggggagttgcctgatactattcctaaggggacattgaccctgtgttggaatgtggggagatctcattgatactgataaggcttcttatttatttgttgatttagtatgggagaagatctccaatgggtcaggaaacagatttgtgacattgacaaggattctgaggacaattgccctatggtggctggaacgctttagtttgaggactttattgccagaaacaccatgtcatgcattgacttgttttctgcggttgtgataacctaccttgttttaacctgagtgactctctcctaggagagagagccagacagactccgttttagtgtcttcactcgcagccccctttatcccccttaagagaataaccagtgcaagctgactccaagcacatccaggaatgcacctgctgataagatactgaggcaggctataccagcagctcctgggaatgtgctcggtggaaggtacctaagagcccctgcatttatctcttagtgatagtttaagcccctgcacctggaactgtttattttttgtaactgcttctataaccaattaattttttaactttttgcctgttctgcttctgtaaaactgcttcagttaaactccccctcccctatttagaccatagtataaaagagaatgtagccccttcttcggggccaagagaattttgagcgctagctgtctctcggtcaccggctaataaaagactccatgatttgtctcaaagtgtggcgtttctctgtaactcacttagttacaacagggtccttgttcgttcttcacactattgtcaccctgcattcctgcgggagagccctgcttaaacagcagcacatgggactttttatcttgcattcttggtgtaagcaggtgaggacctacttttatctctctctctgcctgtcatgctaaaacaaccagaaggcctctggtttactttcatgagtccctagaagcctgtcatcagagagccagtctcactgcagtcatgattttggtttagctgctggtaaaagtgttgtgtgaaatgttggccatgggccatgcagaaacaggaagagagagcacaataaagagataaaaacacgaactctctgaaggcagttttagggactttgcctttgttgtgtgagttgatatgcacgacagtcccatgaattgggttttatgtaaggtcttcgtatctcacaaagacatgcagtgcctcatgcaagttcatcctagttggcggcacctttgtccaaggtcaccacattatcagtgcttctcatagctgctttgtgtcccctctctttgcagacagtaccacctcacacacactgtccttcgtgtggcctgtggggaggccactatgcctcacctgaccctaggttaagtcaaagtgaaatggaaaaaggttcacagtggaagagaagcctccacaggtgacagggcatggaagaagccctcaagccctcaagggctggctgcaggaggcacagaatgaattgggctctcccccaaaagagagagcttcaacagagagtggaagagagagtgtgtcagagacaagcaagtgaatataaatcagccatgtgatgctgaggcaaggagggcaagagagccagagaagggattcatatttgagtgagggtggccttggactcaacacttcatggtcatgcccaagccataaatgttcctgatctacacaattggagaagagcgacaagaaacacagagcattcagaggagagcctggaatttatggaagtaaagtctgtggggacactgcagcagctttggtcactcaccatgaggaattgtcatcttcaggggataaattagatgacatagaaccttatagctttgtctaggaggaacagggcttatagacaacttcaaggagacagaagaaattgaccaaagtccccttagcttctttagacatgaaacctactgattttcatggtaatatgtatgtgaagccaatttgtaaactataaggagacaggaagagatttggtcattggagagggatcacctgaggtctggagttcgagacccagctcggccaacatggtgaaaccccgtctctactaaaaatacaaaaattagttgggtgtggtggtgggctcttgtaattccagctactcaggaggctgaggcaggagaatcgcttgagcttggcggggcggaggttgcagcgagccgagattatgccactgcactccagcctgggcaacaagagtgaaactacatctcaaaaaaaaaaaaaaaattgaactccaggactgacacaggctagctctgggatgctagaaagtcacctctgccttttgtttcagcattcttaagagactaataatacctactttattaatggatggacttgttggaaatcaattgatagagaatgtataaatatactctgtaaacgatgaagcattttataaaaatataacttcacattgcacggatatccagtttttttaaataaaatatgcagaaagagtttattttggtgtttgatatattctaagatgagtggtaatagcaccttttagtacttcattttgatttctgttctagcatatttgctcttaaaactgaagagtaaggggaaaataaagatgaaaaatatgctttgatatttccaaatggagcttttcaaaatgtctccgatggacatggttaatatcagaatgttgaaattgaatgtagatgtatcaatgtgttaaataaaagctattgtccagcttaagaattatctctcactatagtaatatctaactagtagcattcataattgtaatcttttctacaatatttttgtaagaaggttgatcttaaaagttacacaagtagctttaaatatttgtgtctgccttgacaacagaaatcagtcaagaaggcggcgggtttatttttctttaggtgggtaagtatgataagatggatggtgcattaaaaaataaagagcaggacttctccaagctgatttacatattgattacttaaattactacttaatttagtgcctgctaataaactgtgccttggaaatgtttcccaagcatttattggctgcagtaattctacctacagtgtatgcagatcacagcctcattaaatattaatgtgctcatgaaatgttaatagaatgttaatgtgaaatacaagggaatgtgctcgctggaagctgggagccgaggaaaactacctgtcttctgtcttctctttatgttctgtcttctggctctgtttctttttttcagttcatttctcccatcattaggagcttcagatttgctctctgatctggctgtctcagatacaaaatatttagaggggagataaaattcactgattaatggaacttattctcccctcctgctttctggaatgggaatttctggttagaatcagaatggtttccctgaaaaggaaaagggtgattcaggctgagtgaaatgaaattgtctatgcttgggcagactgagtgcatatgttttggggaggccagcccactgcccagctcacctcagtgggctctgaccttcatctctatctggaatgttctttctcacataccttgacatagcaaggtctttctcatcgtttgattctcaatagtccgagaaccttccttgatcacctggttatctaaactcccctccccaagcattccctgttactctctgtcactcaacaagttattttttattttcatagcacttgcgataaactgtaactacctcttttgtttttgtgtccttcaattagaatgaatgcttaatgaggtcagggcccttgtctattttatggggctcagccatcttcctggtggataacaggtgctcaattaatactgttgactaagtgaataaaacacctgtccctgccactgaagagttcatattctgtggaggtgacaaaacagtgagtcactgcacagcatcattgtagatgctactgagagatgatcattcaaagtggtgtagctattaaggaagtcccagacaactcttactggggatgagttttggagaagaagctttagacatggataaagttccataacttgagagttttgttattttgttttgcttttgtttaatctatgtgtagagtaattcccttagttgagagtgttaggaacatctcaaattagcttaagaaaagaggataatttattagatggacaaaaggattttcagaggagggattgagcaacgaaaggggaaagacagggaagtagttgtgctataggaacagggggaccagtaggaataggtggaaccagtctcaaacacttctaggtctcttgctgtctcttgtctctgttttactttgcattttagttttattttcttttttctgagggccaacatccaggtaactcctaagtccacactccaggggcaccgtcagcatagttgagccagtattcattcattctttcattcattcattttttctttctttctttctttctttttttttctctttctctctttctttctcttttgaggtggattctcactctgtcactcaggctggagtgcagtggcactatcttggctcactgcaacctccgcttcccgggttcaagtgattctcctgcctcagcctgccccctagctgtgattaaaggcacctgccaccgcacccagataattttgtttttatttttagtagagagagtagtaattttagtagagatagtttttattttatttttagtattttattcgccatgttggccaggctggtctccaactcctgacctccaatgatccgcccgcctcggcctcccgcagtgctgggattacagacgtgaatcaccatacccggccccagtttttctcttagtatgaagtctcagggaaggactgtgattggtccatcatgtcacattttccaggcatgatttattcaactgatgccagagggtaagatcttgtaagaatatggacttccttggaaaatatcctattgaagtttgagactgaagtcacagaaggagttactattcccaagaaaagaggacagaaatgggaggacaagagagttgtttggtcactgaagtgaaaaagtctttattgtactattccaaaacactctccaggcttctctgtgtaaatgggaacgaacaagcaaaatatcctcttttacagggttgaagagggttgtcaaagatttgggggggataaatgagacttttcggtcctgtatacttggagtactattttgtcctggccccaagagtcttcgtttggggatctgaagtggatctatgtattcatctattggaatgaaggtgatattcttgatgttttccacaattgaatttcctttctaatctgttccctttcccattacagattgtgcttgagaacagtagtcgagaagacaagcatgaatgtccctttggccgcagtagtatagagctgaccaagatgctatgtgagatcttgaaagtgggcgagttgcgtaagtatacttatttcccacatgggtgtgaagctggcagagtcccagcttccagggttgtgcccctacctgtgtgaagaaatcccaagatgccgacagcttcttacggtcatcactgtggataggttgattattatttggctcaggtttacagcatacatacttttgcatgtctggtctggaagtaaatgtgattaaaacctatgggaatggagaaatttgcagatcattgtggctgagtttcaaatatcatgaaaatgagtacatattaaaacaggcttgcttctgttcaggaaaaaaaaatctatggatttcttttttaaaattccagtttataacctaccagtagatcattttcttttctttctaagcaatttttctctataaagaaaaattgaataccttaatgaaattctcttgctctcagtgtttctgttgtttggaatactttctctaagaaagaagaaattattaaagaaaatgggtagctgaaaatgaaaaatgtggtcagcaatatttttattgctctttttcttatatcacaaaatttatgagagtacatacagaaaaagaaaggatgataattttcttgccttttgttcattggcataatttagctttaatctaccaaggtggatatgatttaacctgtccctattatcattgtcgatgttgaaccttcttaaagtggtttacttccattccatccaacatctagaagccagcacacatataaatctttccgcacaggcttaataacatgagcaccagaaaagactgtttataccagaaaaatgttggggtgtttggtattactgtgaaaacataaatattcagttgcctgctcgagagcttaaaataatggcctgaaatgattaatgggaggaatctgatgattacattggaaagagagttatgttttatttacagtgtagaactgactacaggtactgctgaaataaactagaaaatttaatacttagtaaggaaaaatactaagaaattgagcctggttggccaagtggaaaactttatcatcttccagtgtgggctcatgggaggaagcagccaatgatgacatggaacatgagcatttttgcattagaacagtagcagtgtaacctgagagatctctgcattcacctactctggtttacagctcaccaaatgtgaagatttctgtttacatggatccttgacttgagttatccttcttactccctaattacactaactcgctgagatttcagtgtgcagtattgcttactgtttactcagcttaaggatgtaagtcctaaatcaaacaaatcctgctgaattcctctgtctgataactgtgactgtttcatgtttatctcaatttcatgggggaaattggtgaaagttgctggctggaaaacatgtctggaccatctgggagttaattttcagtaactggagtgagtagtggtgttctaccaggcaggtgtttctgtgtccaaggtactgctctgcactgcccttggttgtctcctcctttctgatgacaacctttggctgtttatgctcatcttgatggcagcagaaggcccactctccatgtgtaccttcactcatgttctatgacatgccgtgcccagctatctgctcttctcctttgcccaagggacatatgtctgtcctgctaaaagtaaacacataagagtgatctggtgtaggaggtagagattgctgggaatagaggggaactgagttcagctctgctacttagggccttgtgtccctgagtgaattactcacaaaccgcactgtgctcctacacctccaggttctctccagagcagaatgtctagaaatggattggaagtattttgggtggtgatttgagtagttgtgttcattttctggctgaaattgcagtgatctcagtgagaggagctctatgggaacagtcttattcaacctggggggaatagtttggaagagatggttgaattccagagcaggtgcaggcagggtaaacatgaccctgatgtgggctggcctctgggtcagtggatccccatccagtgggtggaggggacctcagctggcaagaatctgggcaggtagtcctcctcaggtgaatgttcattttgtgcttggggatggggtggggacagaataggggatagagcttgacctctggcaggtgtagagtagccctcctggcctttccaggacctggtggtcaatccaggaatcagggcagaactccatttgtgggctgaagtaacagagtggagatgaaggcaaacacctcgcaggtccctggagatgccacagatgctcttcatgcactgaagactgttccatctcccaccttctgatggagagaagactcccaacattctgccacaactcactcaggcctggtttctgcattgagactgggcttggacagctgaggcctggcattgtcaaagcagtctctcttcacctaagacgacaaacacatttattaatttgttcaatgaaaatctatccagtacttacaacatgccacagactatgagggacactgcaggtacaaaggaaccagatatggtccttgtccccgaaggagttcagaaaatttcctatacacttcagaaagtggaagaatgagctgggactgatactttttcctatgagttttgtcattatgttttttaacgcatgcccatcatctgtcctgaagaataatttccccaatgttgtgatagtcataagtttaagtttttagtttgacttattgcttgccatcatctgcaaagcccattctggaaatttgtcaaggcttacaaaacacattcatgtttctgaagcctacatgcccagatgagttgttttctgctcataaaatattaaggattgttactttctgattgaatgctagacaccaaatgataaaacaccctgtggtaagagcaaaattgctttttaatggattgctttttgcccattgccatattaaataagttactaatatgcaaagctaatctgaatacacccttatgttgaaagaaatgcctatttttcttctgaggaaaattagatttacacacaaatctatcttcacttggtttgtatgtgattatttttctccattcctaagttcatagttctgaacacttctcagatttgtgttaataattaaccttgaagaccatggtcactttagttctataagcaagtgctaagaccaaagaagtactcaattaaaaatctaactgctggggagaaaggatgtttacaaaagtagaaagatccaattttctagaaagcatttctcttttgattttaatttttggtctgttgaggaaacccacctctgaaataccaattatattttggtgtctaaagcaaacatattaatgttcaattaattactgataccaaatatttatgttcagttttctaaggttgctttaaaaaaaaaaacagcactattttcctgcttcccaattattgacattgcaagaagcaaatgttacctctaatagcgtggtccaaaataatgtctatttacattctcagagcactttgtcaaggttattcagttgaaggctgtaacactctcaggagttaatcaagagcaatggcatctatgtttattagtgaagggaagacttacttgcacctactgcgtatctgagtttactgagctcaaactggaatttaggaagccaaaaaaaaaaaaaaagaaaaagaaagacagtgtagacagaggcaagaaagtagagtgattgcatttgggcatctgaatgacccatcttggaatcacagctcagtcactggctgtatgccttgagaatgtttcttctctgttctgagccgctggttccttatttatgagataaatgaggaactgtgctgcacgcagttggttggagcctgaaatgagataatggatgttgtcctagttagaagatgagtaattttagggccggatgtgttggctcacgcctgtaatcccagcagtttgggaggccaaggtgggctgatcacaaggtcaggagatcaagaccgtcctgtctaacacggtgaaacccatctctacaaaaaatacaaaattagccgggcatggtggcgggtgcctgtagtcccagctacttaggaggctgaggcaggagaatggtgtgaacctgggaggcggagcttgcagtgagctgagattgcaccactgccctccagcctgggcgacagagcgagactctgtctccaaaaaaaaaaaaaaaaaaaaaaaaaaaaagaatatgggtaattttttttgcaagtgatagaacctcactttccatgagcaaactgaaagttaggtgaggagggtgctgtggcataaatgacagctggatctagggcctggaacaatgtcccttgtttctttatcttctatatattggttaaaagttttctttttaacctgctttattcatgaggctcttttgtgagcaagacatattttctcttagtttcagtttcaaaaattacaaagaagaatacttagggacctggatgtggtcacatatccccatagcctgaattggataattggcagccccagtcagaagaacaagattgaagattgagggatgatatggtttggctgtgtccccacccaaatctcatcttgaattgtagctcccataattcccacgtgttataggagggacccagtgggagataatcaaatcgtaagtgtggtttcccctgtactgttctcatggtactgaaaaagtctcacgagatctgatggttttataaggggaaaccccttttgctccgttctcattctgtcttgcctgccgccatgtaagacttgccttttgccttccaccatgattgtgaggcctccccagccacgtggtgctgtgagtccattaaacctctttttctttataaattacccagtcttgggtatgtctttagcagcagcgtgaaaacagactatttcaagaaaggagcaagtcttcaaaagaagagttatattccctgcacactgaccctgtgtgtgcagggtcagtgagagtggagggggcagggagtggtgcccttacagaaaacaggaggcatagcacagatgaatacacatgtgcttactgtcaatgtgaagtcattaagaagatgcccagctcctagctggggaaaaagaaatggtagctattttttattgttgttattaaagcacttgtcctgaaagaaataataaattattggctgggcatggtagctcacgcctgtaatcccagcactttcagcggccgaggcgggtggatcacctgaggtcaggagttcgagaccagcctggccaacatggtgaaaccccatctctactaaaaatacaaaattagccgggcatggtggtgcatgcctgtattcccagttactcaggaagctgagacaggagaatcactggaacccaggaggcagaggttgcagtgagtcgatattgccccattgtactccagcctgggtgacaagaatgaaactctgcctcaaaaaactaaaaacataagtaaataaatacattgttgatgagtgccaggaatacttgatttctggtacaaatggatcaattactctcttttgaataggtagaaccttacccaattatattccgatgtcaggtacagctaagatattttattttcctcactcattcatttattcacttaataactgtagggcacctctatgagtcaggatcagggtcactgtggacatggatttagaacccattctccatcctcaggcagctcacactaactggagggtccttcacataaataaatgattataaaacatttttccatttgtaacattacatttgagtcacattcatatctctgggaggcaatacttcattccttctgtttgtgaagaactgggcagggctggggaaaggagagtcttgcaaggtgtgatagagaagaagagatacctgcacgtggggttcacaaagacaaagagatatcaggcagtcatggctgtgtggatggtgggaggcggctgttgaaaattccaggcagtgagaaatggtaggctagaagacctggaggttcaagggattctagttccatgtagttaatgcagagggtttgagggaggaagcaaagggcagaggtgctagcagaagcagttgtcagatcacaagtatttgccatgcagagagttttgactttaccttacaggcagtggaaaccaatagaaggattttaataatgaaaagaaatgtcccagttatgggaataacacgctagaattagattatattttctgggtgtgacagacttgtgagcatgatggtgtacaggctcaccccagtcctggcctaataatgcagcagttaggacaatttcagctacaagtagtagaaatctcaactcaaaatgtcctgccaaggacatgtattgcataagtccagagttgtgtagatcctagagctggttagcatacctgtccggtgatgtcattagggacccaagttattttcatctttctgttctgtgtctggtagcaagatgatggctaccttcacatagtcagaggaacaagaggccatctcttccggtggatctcttttaggtgtgtagaagtgtttttggaagactttcagcacactttctctcgtgttttcttggctgacactttggcgtgtgactgtgcctagcccagccatggacagggaatgggactgtccagaggttggattagccattacccattacccattagtataacatacctctcctgagtatgttatatgaccacaggatgttagatatctaaagaaaactggagttatgttaagatgggataaataattacttgaaacccttaattctgtctctttacagtcttttctgcagtgtccttactgatgcagaaaaccataacaaattgaagccagattacagtcctctgtcattttgtcttcattgagaattggggaaatgcactagtatctttttaaatgcagcaatatcaaagattgcagaaaaatggaaattgaggtttgattataatgcatttcttctttcatcactaagatgctagggctccactgcattactgtccttttagcaaatggatatttccacttcttcaattatgcttttgtgtgggggttattctcaggtgtattttgaagagcagaatggacatacatttgtgattgaagccttgaaacagttttgccaaattcacctgtttgaccgtttataattagattacaatttaatactactgctctgggtttttttttaaaaaaaagcaagaaagaaacctacattacacattatgaaaatgttcaccatttccttactttgtctttccatggcaatatttattataatacaccagtggtgccgagtggagcaccttgtataattcatcacccagacacctctgctttagcaagtaaaaataacacagatgagcaacctgaaggactgtttggagtgcagcagcaattagaatagacacttaactctgggacattggtgtttttgtaccttgagaagtaccatccgtcactttcattcttggggaatacattctggctaaagaaaactcaagaaaattagcttttaacagttaaatctcttaaggacctttttttttctccaaatacgagcttgtactcttgcttatgcaaagtggaatgctctcagatcttgattctgccctgaattttcacgttctactcttacattctatttcaaccttaagtttaaagtaaaacaaaaacaaatgttctaaagcctaactttgacattaggaagttgcagacacttttggtctaaattaaaatcatcataggagagagcataaaagtcatttgaaggtgattgttttaaataattaaaaaactaatagtgggatttataatggtattctccaaggcaggagagaacttcatgtaaaattcttgcattcaggatcagaagcccttgtgataggcatagttgatacgaggacttttgccatgatggttaaccttcatcttgccccttactgtccccatctgtaacatagggatatcatcatcagtcatcatcagtcatgatcgtcatcattctcatctgagaatcaggtgaggaaatgttagttaaagtgctttgttaactgtaaaatgcactatttgtggaagaaataaattaacttgaatatgcacaagcttagagataccaagatgcatcttgcagcaaagccaactgtttctgtgcattttgtggatatcctaagaatctgaagttctgtggtgctttgtttgtgtttcagaaagcagtacttggagatacttctgaaattgcaggaaaatgttcatccccataggaagtggttacagagagcaactaaacttggcagtttaaaaggagactatactaagcacatctcaattataaatggatgaaaataatatttatcatagactttttaaggacttattcctttttacattatttctgaaaagatatagctggccccaatcagcatccattcctgttgtctcttagaggtcatggctaagaggtgagcctggtagatttgcccaagctggtaatgagagatacagacctgttgaaaggcacaggctcccattgtcttcttaacgccttatagaaacacttctggttcatctcaagcatcgtttgggtgactgttctgattcctcgcctcatcttcactgtgggagggcattacagctccctcagaactcctgtagcactttatctgtgtctctttgttatgctttctactgtttattaatacatacccttttctttttctttcattcctggcctcacttcccctaaaaattggggtggtttataggaaaccttgaagataataaaaaataatgataaatggtaaaaaccacggcaaataaaaagtaaaatgaaaaaatggatgatgaaaagtacatgttacaaaagcctttgcatttgctagcagtggacactgaatttggctcaaatattcatttgtctcagggaagcaagaggagcttgaaaatatgaaacaggtcagtgctccatctcacatgaataagctcaatgtgaaaacccagatgctaatttcaatttaaacccaataatgttaaaatagtgtttcataatatttaatatattcattaaagatgatggactaggacacactcttatcattaaaaaaaaaaatctgccagaaagtgacaagctagcatcattcttaaaataaagataccaaaacagctttcccatcaaaaactgagactaaactgggatgctatatgatgctgattattattcaccattactatttctccttgatctggaaaacttacaaacacattagaggtagagttcatcgatagaaacaaatattttaaactgtaggtaataagactttctatccctgaagaagcaaaggataagctaatgtggtttagaagagtagctagatagtgaataaacgaaacttagtagatgttccatatgtcagcaataattataaaatggaaaaaaaagattataacagtagcaatgaaaatgtaaactactttggaataatcccaatggaaaacatcttggaaacttaggtgaagaaaactgtaagactttgccaaaatatacaatagacatttcaaataaatagagaagcaaaatgttttcttcctggttagaaaacaatatgcaaaggttgcaagttcctctacattagtggacaggctcatatcacattccaaagtatcactgggaattaggatggaaacttcacgggatgactctagacttcatttgaaagaataagggcatgagaattggtaagggagaattgatatttttttttggcaagaaagttcaaagatttcttttttttttttttttttttttggagacaggatctcactctgttgcccaggctggagtgcagtggtgtgatctcggctcactgcaacctccgcctcctgggttcaagcgattctcttgcctcagcctcccgagtacctgggattacaggaatgcaccaccacactgggctaatttttgtatttttagtagagatgggttttcaccatgctggccaggctggtctcgaactcctgacctcaagtgacccgcctgactcagcctcccaaagtgctgggattacaggtgtgagccactgcgcctggccaaaataactcattcacccaggttcatctatagttatgccaacattttgccacatatgttttatcattcaccctctttttctctccttctcttcacacacacacacacacacacacacacacacacacacagtcatgtattgttacaaaaatgtttcttttagccaaaaaaattgttttaaaaaatataacttgaagaaaaattcaaaatagaagtatttaaaatcagttctaactccggcctcttgtgtctgaaagagcaaaaggtgctggagccctgcctggcaggaggcttgcccgggagggctgtggaggaggaagggactctgctgccacagagtgaggctccatctggaagtggtgtccagagcctggctgagcacctctgcttgcccttagagatctgagagagacgcactgccgcctaattcttcccaaagcaggtcaacggtgttgctgtcagggaccttccttggatgaaacttacatccaccttcccttctggtcttttccaatgctagtggatgtcgttttcctaaaatcccagtggttatatacatgaggaagtttaaattcaggatacaagcatcttatagcaggagaaacatcataaaacaaaatcacaaatataacaggattccaatcaatgacggaggccatttgcaggatgacatcatcacgtctcatcagtaaaatgagtattaaagtgactagtctcattccaaaggtgtaaagtgcaaaaaccatctttccctagttccagagatgccagtctcttctaaatctcaagcttggacccacgggttattttttttttccaaagcagtaatcactgttctcagcatttcttgtaggatcgtgatgtaccaggccatacccttcaaagtcctcataagttgtaaaagtagaatattagtatggaaggcagcatgaaattggagggaaagtataagcagaatgctagaagattctaatagatagtaaaataaactaacctcactaaaataaagtaaaacaacagaaatcaggatgtcaaactgcactgaaaagatgatgaaatgctaactgtaaagttttcaaaaccaaaatatacatgagtgaaacaaacaaatggaaaaaaaataaaaaaacaaaacagaagcatacccacagctaaagtctttaaaacactttttgcagacactgtggcttcctacagtgtcagtttttccctcagggagtctgcagtagttaggggagcagcttgaggacagaaagctctagaatgcttttatttctcatccttaacctggagcctttggttgtaaagatttacctggtggttggaatagattagaaggtggatgccaatcaggtctcccagccttgggcacttgaacttcaatcaaaaaccacttgctgattttggctgggcaggatggcttacacctgtaatccaaccactttgggaggctgaggcgggcagattacatgaggtcaggagtttgaaaccagcctggccaacatagtgaaaccctcgtctctactaaaatacaaaaattagccaggtatgctggtgggagcctgtaatcccaactacatgggaggctgaggctggagaatcgcctgaactcgggaggcagaggttggagtgagccaacatcatgccactgcatcccagcctgggcaacagagtgagattccatctcaaaaaaaaaaaaaaaggaatttgcttttttaaaaagagggagaccactgccatttattggatgctttctatgtaacagagaattcccagagtcaataataagcacacgttacctctgttaacccctgcaacatcttcatttacaaataaggaacctgagatgaagggagaggttaagtagactgaggtgatgcaggtattagatggagtgaattattgtgagattctcctgtgctgtttgcccttaactatggtgcaatgctatcacccactgctttcactttctttgtaaatatcctgtcttccttacagactgtaagccctttgaggactagactcttagtgaattcagcttccatcttaacttctagcacagtgttttacatgtagtctgcatttaataagcgtttgttgcatgaatagagtagctttctgtttgcttcagggtcagttccaaaaatattcttcagacattgctaaatttttaataaactttgcattttaccctgaaacctctcaaacaacattcttgttttcttctaaaataagtgagaatgagttatactaaagggctcctcttcatccctctccctcccgctcctcctcagggtaatttggttgagaaggcccactgagtccaaatttgaattagaaaatatcaacactacagtatgttcccccaagaggaaaaaaatgatctattttcaatcttgtgtttcagaacacacagctgtgtgacttcctaatttattatatccccaactgcctccagacagctctcagcttgctgctttttttctacccactcccgctctatgggaaatgggttcgactttaaccagcacagagttcaatctctgttctaggcaggactccagtgaggactccgagaggccagtaaacagcacttttccaaagatgcctcctcctcagcaggtgctcctatccaccaggacttgatgggagccaggtcccttcagatggtggctgtaggaagccaggctatcaggggcagctccagctggcaggtcttctggctgcctgtctctctggagtgagctcgctttcttcctcccagagagggctttctggcctgtctgcagggagcaggacacagttttagatcccagcaaacaaacccaatgtggcttcccttaatttggcttcccaagggttttggccgcaagaacagattgcagctgtggcctgagcatctttagaagtgtgaatcacattttttttccctgaagaagctattttgagctttataattacatatttccatgtttttttttatagagtgagtaaggagaatgacttgcatttttttaaatggaaatctgctggtttctttgctcttctgtcttgtataacttagtccagtgattcctgacttggctgtgtatcagattcactttggggagcttctgtgaaatgcaaattcctgcaggggaatccagaaatcagcaagcttaatagactctgcagttgattcctaggcagcccgatggccccctcccaagtttggacctacccttccctgggaattcagatcatggctaagtggatattactctggggtggcaagagccactcacagtgcctaagagagattaagcattagaagacctggattctagttctggctccactaccaagcagctctagacaagtgtctcctgtatggtcctcatgttcctaggcggggaaatgctgggattgtccaggtggcccccagctctaaagctactgtggtactccttgttatgtaaccaatatgctgactgtaaccactacattagttatacttgaactttgttgtcacctgttcttgagtgacatatgtataacctgaactgactattccattttgtacaagagaattatggaaatgcccacaggccttgttataaagggctcctggggaataggcaacctcaaagcacggaccaaaggacttacctctcccatgcaggtgtgacgactctcagcttttggacagagaattaagcaaaatgggcttttctgtttgtttgtttgtttgtttgtttgtttgagacagggtcacccgggctggagtgcagtaacgcagtcacagctcactgcaacctctgcttcccaggttcaagtgatcctcccatatcagcctcccaagtagctggaaccacagacacatgccactacacacaatttttacacagacacactactctacactataccaatttttttttggtagagacagggtttcaccatgttacccaggctggtctggaactcctggactcgagcaagctgactgctctggcctcccaaagtgctgggattacagacatgagccaccgtacctggctgtgaaatatgcttttctcattctgcatgtttttctcctttgaaatatcaaccatcagaatcttttgagaggagttaaacattaattttgccagaacagatataggaagtggtaaaaaaaaaaatccctctgttttcatcattttctgcccaactgatttctccccctctattttcccatgcaagcatcctctgggctaggtttggtggccactccattataatgccagtgcagcttttggggactgtggcaggtgcctggcccatctttacgtggaaacagcggtatctaaataaacctgacacatggaggaagaaatgaacctaaatgcaaatgctattaacatttctgcaagtcatacctatccccaagaagcatagctctcatgtttcttagtcttttattggcaatttaattgtttgagaaattgctttttaccagagtccgtaagaatcctaccaaaatgcactgacttattttcccatcgacttgcccgggtgagaactcagcttgctgcttttctgtgtcattaccatcatcagaagaaacttcaaatgtaaggcctcgcagggttcattgttttcattattttttttgtttttgttttagatcaagagtttaccttaatgcacatcgtattagtccattttcatgctgctgatacctgtgactgggtaatttataaagaaaaagaggtttaatggactcacagttccacctgtctggggagacctcataatcatggcccaaggcaaaaggcacgtcttacctggcagcaggccaagagggaatgagagccaagtgaaaggggtttccccttgtctcgtgagacttgcttattcactaccatgaaaacagtaaggaggaaattgctcccatgtttcagttatctcccactgggtccctcccacaacacatgggaattatggaagctaaaattcaagatgagatttgggtggggacacagccaaaccatatcacatatactgtaccaaattctcctaggtgattttattataaaaatgaactaatacgcatattactttatatcctgattcttttcacttaatgtgttagagacatctttcagaaaatatgttcattcaaaagttcattcaaacttttaataattgcatagtattccattttatagatagggtcattttgtggatatggatataaatagtatttcattttatgaaagtatgtctcccattgacaggtatttatattgtttgcaattttttttcttataaagagcaccgggatgaacatttgctcagtaaatacacttaacatgttagcactggggctatagcagtgaaataatctgactactatccattcccttaaagagcatatattttagttggagaaaggtaataaacagataaagaagtatgtcatatggtgaaaaatggagaaaaatgcagcagaaaagggaggactcatgagattgcctcattgagatggtgacattgatcacaattatgaatgaagtgaggaagtgggccaagatagtgtctggaaaagagttttccagaaagagggaacagccaatgtgaagaccctgaggcaggagtgtttgccatgagaaagtaagaacacagaggccagtggggctgaagcagagagaaccagggaaagatagtataagagtaggctagagggtggccgggcacagtgactcacacctgcaattccagcactttgagaaggtgaggaaggtggatcacgaggtcagaagttcaagaccagcctggccaacatagtgaaatcctgtctctactaaaaatacaaaaaaaaaaaaaaaaaaaaaaaattaggcgtggtggcaggcgcctgtagtcccagctacttgggatgctgaggtgggagaatcgcttgaattcgggaggcagagatggcagtgaactgagatcacgccgctgcactccagcctgggtgacacagcaagactctgtctcaaaaaaaaaaaaaaaaaaagtgggatggtgggtgagagattcttcaggtgcttgtaggcccttgtaaccaatttggcttttactctacgtagaaagagaagccgttgggcagattgagcatacatgtgacattatgtgatttataatttcaaagaattgtgtggctcatgtattgagattagactgtgggagagcaagttaatataccccactacaataagcaagttgagagatgatggtgtcctgaaccagagtgttagcagtggcagtactgtaaaaaggttggattcaggatttatgttaaaggtagagccaacaggattttcctggatgattggatgtggagtggggaataagaggagtgaaggatggatgactagaagcagggagtcatcactgaaattgatggaggggcatagaagattaggagttctgttttgtttgtgttaattttgagatgctgtttagacatctaattggagatgttgatttcatagttggatatatgtgtctggagtttaggggatgattttgaattggagatgtaactttgagcatcaacagtatataaataatagttaaagctatgagactgaatgaaagcattgaagaggccctagaattgatccctagagcaccccaagatttagaggctggggagaagaggaggctggggaaggagttgagtggggctcccaggggcataggaagaaactcaagagaaagttcaattcaaggtgaaggagagattgcagtgtcatatgctgcaggtgatggggttaaatgaggactgagaactgaccattgatttttagtaaggtggaggtcagggtgacctgaacaagagtgatttcaccggagtgggggaggagagagcccaactagatgggttaagagcaagtaggggcagaggcaatgggactattagtagagatgcatgctgctcagtgtgggccactgatggctgtgaggagatagtgaagaggaggcttttagaaacatttacaccatttgacatcaccacagccttcaagcccatgatcctttttctagtggttaattttcattatactttttcaagagtgtctgtttctaatcaacaagttagacattgaaaacaaactggttttcactgcagatagtttgagaggtactgatacagatgaccatttaaaggggctttgcttcacagtgatacagaaaataaggtagaagctgaaagggaagttatagtcaagtgagatttttttattggtgggagaaataacagcatgtttatatgctcctggggaagatttggtagagagggaaaatttgatgaagacggagacctatatctctgtctttacacacatcttaataatttccttagccaagtgtctaccaacagattctgaattagatagtgcacacttttagtatttttaaattcacaggtaatatatgctcaatgctaaaaaatttaaacatgtagagaagcagaaccaataattatctattattctgccaccaagagggattcatatatacctttgtacgctttttgggcattaatacaggattaaagcgtgtatttttaaatattctattatttaatatattgtaactatccacgataacaaaaatataattgtatcattatttaatgtctgcttagtgtttcattgtgtgtatctactataattaatttgactagactcattgcaggatatttaaggatatttccttttttcatgagaaatagcactgtgatgaacatccttgtaattccatgtgattatttcctgtaaattaattcttagaagaagttctatgtcaaatggtttgaaatcttaaagctttttatttatttaccaaattaacccctagaaaggctgaagcatttgcacttcacagagcagtcatgtagattcagataaaaggcagttttcaaactaattaaaaaattggaggtagaggaagaaacctaactgagatggtgggatttggggtgatcatatatagggagatattaagatagatggatcattaatagatatagacatgagagagacttacagatgtaggcatggtagatttatgcatatttatgatagagatttataggtagagatttatagatagggatttatggatgctctttcttcatctacactatagccatattattactttcatgtgccctaggtacttttgcctttgtgggtcccttccttcataaaacagtattaaaacttaacattttatgactgcattattataaagatgaatataatcgtgcccggattcattattatatattcattattctatttacgttttccttctgatttaaattgaacttaaaatattttcaggggcctctgaaagcatcatgggcctgcagcactgtggctgctgggcctcctgactaggtcatcctgattctgcttctctgtactctttatatttttgataatgaatagacattacttatgacataaaaaataaaagaggaaaatatcaaactaaatgtataaatattcatgcttcctatgtaggtttctttccctttactcacgaaggcaggaggtacattcccctttgctcgtatgctctggatcatttctccctaacagtgggttagactggaaggcctggctcctgcaatcaagaaaaagtgaaaatgcactagctcctctctccacctgtggctcctcctgacccctggggtcaccatttaccccgttgttggcgcctgaaacttgctgccatcttcagtcactgcctcacatccacagtcagccagcggccacgtcctgttaattcagtacccatatttcttaaatctcctgatttttctgcatatgtactcccatcactctaattcagatcaccattgtatggcctgcatacttgcctcctccaatccgcccctgcttcatcctgcaactgtgtattttttcctacagcattgtcagacctgtctaaaactcccattgggccatgattcctcttaggctgaagcccaaacttctttgcaacaccaccacgccccagaaatctcagtgtgacgtgcttcctcttcaccctgggccatggcccacactgggtcctcattccagaatgtcctttccatccctgtgcttgtacaattcagacccacttctcagcctctctccctgagggcacagctccctgagacctgggcttaatcctgcccttcgccctgttgaggcacatctcacactgtattgaattgcatatttgcatatctttctttgcagcttttctcccgccagctccatctgccccataattagtatcagttccatcccaattctagtataagattgtcctttaatccaacatgtatgtaaagcttggagaggctgcacgggttggagcggggcagctagtggctaccatactgaactggacagaagacagttttgttagaaagttaaattctttgttgtcgggggcataattgggacagtaaataatccgtaaaatctcccagtcagcacaggcagttacatgagatagtagaaggcaatgggaaggctcttagccgcagtgccagatacacagcctgtgctcagcagatattgcctgtcactatcatcctgatggaggcagcattgggaacctggctggccagaagtgggggctgtctgtggtggagcgttgtgcaccctcaggatgataccatcactggcagtcggaaggaggtgagaaaccagcagatgggtcctgctgctgctagatactcaccaatggaactcaagatctttgttctctttatgtgggatggagccccagattctttgctgcccctgaccttgaggaaaagttagaatcatagccaataacacttactgaactattttggctaactagaggtttgggttttcaggtgataaggaaacaaatttaaacagccaaacaagatcaatctaaccttctggttgttgactgtgttgtttttcccttaaaacactggtcatcgtggctggtgagatgggcaaaagagaccgtttcctgaacctttattcttacttcatcggatcccatgccacatggttgtctgtatttatgcttaagataatactataatttctgtcatttttgagtattcctctttagtcatgaccttgagtcctttgatttctagctttgagtagttcatgagatgtggttgtggaggctttttatctcaagaaataggaaaaaaaataactggaaggaggcagtcaaatggattactctctggaagtaattgagaatagtgactcatcagggggtaacgaaatgactttagtgaattttggatagtggtttcaaaatggaataaaataatttttagagtgcctcacaagtagcaaagggaagtgtttcattaaatcagttttacattcatctgcctgtgtactgggatgtagtacaaatgtgtttcatactgtaggtcacagctgaaagagtttaaaaagttcccctcaacccccaccccattataaggcaattcaccttgaaattacttactcaacagagcattgtctgttttcacattaatgaatgcattacacatttttttattcaaattcattattttgtgtcagggtttatcttaagggatgagttgcctggcacacagtgatacaaggaagggtgatcatcatctgtcaccatgcaattcctgctcacagcctttctgttggtgccacttctggctctttgtgatgtccccatatccctaggcttctccccctcctagaagggcttcttgatagattagaaaataagaatgagtgacatttcctatgtgcatataagaaggagccacaagacatgtcttttaaataaaaggacagtgtccatccttttagctgccgaatagaaccttggtctcatcctcctggagctaggccttaaaacagcttctgtgtttctcatttgtctcagtgttttgccagggttttatcggaaagataatgttccgtttaaaatatttcctaatgaggccgggcgtggtggctcacgcctgtaaccctagcactttgggaggctgaggcgggtggatcacgaggtcaggagatcgagaccatcctggctaacatggtgaaaccccgtctctactaaaaatacaaaaaaaaaaaaaaattagccgggtgtggtggcgggcgcctgtagtcccagctacttgggaggctgaggcaggagaatggcatgaacccgggaggcagagcttgcagtgagcagagatcgtgccactgcactccagcctgggcaacagagcgagactccatctcaaaaaaaaaaaaaaaaattccaaatgaaagccatcaactactatctacgtaaaagccatgtatctaaaacccaggcagaaatggctggctaagtgttacacaccttttattgctcgtggacatcttcacacacaatccagggaatgggaataagtgcggcatgagaaagcaatttcagggttccgactaataagaaaatgattgagtagtcattcacccccattcaagccaaggtctgtggaaaaacccttactgctttgggccttgaaagtctctgtaatctggcttctgcctgttttttgccttaaatttctaatgcaattcaaaagaaaactaacaaccaaaatcagcttgcattttgcccatttgcaactccctaaacaagctaaacctcctcacttctgactctgctctttggtacgttctctccctagctgcttctggtctaatattaaccccacattcatagccgggttattgccaccaccacacaaaactctgggggccctggatccaggctaagtataattcagtgcacttctgtggggcacctactgtgttgcaagcatgatactcagataggacagcaaagacaaaaggattcttgtcttcatcccctcgccctcctgggaacccaggccacagagttattaggcaaatacctactggacatcagctatgtctcagatctcattccaggcactgggagtttattgatctggtgaagataaccgaaaagtgaatcatgagttatttcttatttgtttatattctaacaccattttaagctactgagcaaagagtagttctctagaagcaaaacagaatattaataaagctgttttacccacagtaatcctttgatttctaccactgtttagacaagtgacatagcatagattttatttccaaatattttctattatatttaaattatactatatatttataccctatatatgaatttatgcatatataaaatatataaatgtatttacatatatacataaatatatagtattatattgatatataaatatatttatatacttaaatatatatttttgcatactatatatttatactatatatttaattatactgtattataacttttgagaagatcagtattttcattttttaaaatagtcacataattgttcttgaattcttttctgccatttccctacttctcctaaaatatcacacaaaatctggactgtataagatacatagaaatatattttaatattataaaatcaatacattaaaaattttagtggtcaggtgcagagtggctctttcctgtaatcccaatactttgggaggccaaagccggagggtctcttgaggccagaagacaagtctgggcaacacagcaaaaccctgtctctacaaaaaataaaataaaattacctggacatggtggtatgtgtctgtagtcctagcacagacccaggagttcaagcatcacagtgaactatgatatgttcgtgaaggatacagtgccaccgtactctagcctggacgacagagcaagaccctgtctctaaggaaaaaaaaaaacatgcacacacacacacacacacacatacaaaaacaacaataaaaaccagatgcttgtccgctgttgaaaatgtagaagttttagaaaatgggaatgatatttaaaggagaaaattaaagccccttactattctgccaccatgagataacagtgtaggcatagtgatgtgttcccttttagcctctactgtatctatatttgtatcctcacattatctgcataaatacatgtgtttgcatatacatgtatatataaaaaatgtgggatcatactgcctctgaagttcagaatcctggtttcttttttccttccctcaaaattatcatcagtaacttctttctatatcttaaaatatccttcaagggcatattctttaatgactagatagcattatgttcaaaagatgtctatttctatatattgagattgtttccaaatttttactgtaaaaaacacctctggctatatctaccaccagaattaacgcaaaggattcatttttaatgttttacttagaagaaattcctagaagtgaaattgctagtcagtgggcatgtatgtatagttacttagatagatgttgcctaactgccctctgaaaagtttcctttgatgtttctggccccttagcagggatatgataaaattatagcaacaataaaagaaaaccaagaaacctctttgtcaacttgagagttcaaggtattgtctcattcttggctcttttatgagaaaggttaaacattttttgacatatgtattgtccatgtgtattttgtgtgtccaaatggttggttctgttgtaattgcatgtgagtggtactcgccttatgttttatgaagaagagaaaccagtggcaccccctcactgcaggctcctcctagttaatggtgacgcatgttattgatgtaggaactgaaggttgactctttaagtaataaggggaatggatgattcctcatttgggatgtgtatggagtggtggttttacttacgtagtttactgctttaaagatattaaaatagaggagctatattgatttgcattccgagttcataagaagttaagtattgagggacctatattgtgttttcatgctgctgataaagacatccccaagactgggcaatttacaaaagaaagaggtttaatgaacttacagttccacatggcagtcacatcgtacgtggatggcagcaggcaaagagagcttgtgcagggaactcccatttttaaaaccagccgatcttatgagacttatttactataatgagaacagcacaggaaagacccacccccatgattcaattacttcccaccaggctcctcctacaacacgcgggaattgtgggggttacaaatcaagatgagattttggtgagaatacagccaaaccatatcagggcccaagcccaattttcagaggagacccttttttggtgcttcatgtactttaacactctttgttttttgaattgccgaaagcctatagagtagttggattagtagctaatttttgtaagttttagattatttttgagttaatacttttagatttaaaataaagaatgctcctcctcattctcaagaagaacttgtttactcttgagcttcagctcccagctgaagagctctcctgaacctttttaattgagtatactaatattatatatattgtgtgcgtgtgtgcacgtgtgcgtgtgtgtgtatttaaaagctagataatattccaaagaaatgtctgacctaagataatgtttgaaatgggagcattaacaaagttagttttgcctgaagggaatttttcttattttaatctactagcaaaattaaagagcctgggggatgatatttttagctattgttagtaaataaaatatggtagcatgagttttgtttttttcaagttacaccaaataaaggaagatgttatcaaattgtattgtcttccttacttgttgaatgtacttaaattttttagcttaattaaacctggggagtggggaaggtagagactatgtgtacaccaccattgagctctctctggagttgaattctccttaggagatttgaatcaaaacacccaaaattgattctgttcttgaactatagtcccactcaagactctgaaacacagttatgaaatctcttgctagtttctttttgagagcgtgaggccagctttgggaaaaatacattttttttcctaagattgtgggcatggtgaagaatatgaggtttgaatgtgtaggggtggaggtggaagggatgaataatttattctctttcttttctacctactattcatgtaaatggaaccctacaatgtgtagctttttgtgtctctcttcttccactcaatatactggtttaatgccagttgagattcagttttctttgtttcttttgttctctttttaagtcagagtcatcgagggataatttatacagtaaaacttacccttttttgatgtacagttctttagttttggtaattgtataccatcatgtaaccaccatcaaaatcaggatacaggctattttcagttctcctaaaagttttctctggacaatgagttttgcctctttgactagtagttctcagttggtggaggataatcggtgggggaatgtggtgaaagtaaatctaggctcattgacataaatctccactaatctcattgagttaactgttaggatgatgcactgattccttgatgagagtatgcctcccctttgtgaattgtatataaaggaatgtcccagaagagaaaatacatcacagatgctccccttaactggattaccctacttagtttattaatccaggtgtggttagttccacagggtgagccaggagccctgcctgacaacagagtaaagctggtacccatcattctgaaatccatcatgtcatctttcactagaagccaggaatggccagaccaaacaagaaagccttgctcaagacacgtgggaccacagatgagaacaggaggctggaaacccgtgtatttgctgatcttggtttccaatttacagctgttatcccagactgatacttaaatatgtgttttaagtataacacacacacacacagttcacaaattccaacggaaatcaagaaagggtgcaatattttcagtgaactaaattgataaatttttatggtcttagccctctactatagatgaaaaagaaagaaagaatacaagaggattgcatcttcatatgaatttttcccagcctctcatattctcatatcctcttctcgtctgtttaatcacactccccaagatgtggaaggcttgtgaagagccacagaatgaagagacttaagcagcatgggctcctctgccatccaatggtgccaggaacgtagggtgatgaggatgtaagaggatgcagtggcagttttccctcttttgcctcctttgattgctatctccttaccccctagagaaatatcttctgtgtctgattggatgaggtgaagaaaagaaaattgcatttatttgaagcttaaagtttagccagatgggagccagcttaagtttcatttgaatataattttgttttctcccctcgtcaccctcctatgttgagttgcctctgacaactgataaaattctcattttcaagcaaatctaggatttagatataaatatgcagagagagcacagaaattagctcatgttctcaaagttaaaaagggtgaaattggagtaacttcacataagaaaaatttcaacttatgctggtaagatggatcgaaatagaatataacaatattttagttataaaattcttccaattcttaatttttaagtcagtagaacattctagcaaagtttattactaattctgagacccattttctcatcaacttttagtatgaaatcggagatcggttccatttgaaacatttcttccaaagattgagctaaaagtgcttgttatgaaataaattataagtttggggcatgttatgagatgtgagactttagaaattttagcacctattagtcattcacttttctttgctacagtgaggcacaatttgagaatttctcttctagggaatttcttaatttcatgtttgcagctgctagaacttttctgattttagtaactctggttctggatttttcccctgcctcatacatgaagtggttgggaagtgatggagtggatttgttttgactttatcagatcaagaattaatttactaatttgagtggttttcatcaagaaacatattcttttccttctaaatagatcgcttagatctatttagagaggtcttaggaccagacttgtaaggtgtagataaagcacatttttttaatgtattccttttgtctctagttagacttactggggaagtggggaggggcttactggccaaccctgggagtaaatggtaaccatttattggagctcttagtggtttagaatgggattggagctgttcccaccactgggaggctcccagggagcagcagctgcaatcttagaggaatgaaggagtgtcctactgtcaggatagaaccctgactcttacacggagagatgaggcatttggagacatgtgaccatcatttcaaaatgaggtcattaacacttttatatttcacatgtagaattgtcacttaaattcaaactgctgttttataattattttgtattagccacctttatatttaagatttatagccttcaataatttgggggaccatctcatgacctaggagtcgggctcattactatgtaatgtttgcttgtggggcccagacctcctaaaggggatttctgtaggaatccctcaagctgtctgtgctttagtgagcaccactatctccccttttgtaaaccagcatgaacactccttagtttcattatatcattatattgggtaatgaaccaactgtagttctctctactctctcagttatataagtctgagacattgcatgttaatttctgagttacctgtatcctaaatgttttgttcttttatgaaattgattttcttatttgtgttttactgaggcatatgctaaaattcatctgccttaacagagtgggcctcatagttatactagcaagtgcaataagaagagatggggttatgtcctgggaattaatgttgacaataagtgtcatatacattggccactgtcaactgtgacctcatcacatcttaatggtcacaaatattctattactaagaataggtaaagtgccaaagggtacaggtggtttcctagagcgggttcaagaatatctctttaacgtcactctcacttgctaacttactgtactttcctgagacagggagactgggatagagtttcacccggacagctgggaactgctttactgcacaacccatctcatgttaccacagccttcatttagggcctgcctggggaagggatgaggcatgtgaactttcccatgtgtcaaagtggaacacgtgacccacagtcagttccacttgagagcagtagacctgtgcccaggccatctgtgcctattacctgttggtcttctccattctcttagcccagtatttggtctctaatgttcaaatgcaaatgttctgagtacctccataatactgaattttggattctcataaccccaagcagagttcgaactgttttatttatgagtgagaatagctcgcctagagtttatatttcaactcatccttctgagatttgtcagtgactccagtccgagaagagccttcaagaacacatttattagccacatgagttctttcaaagaagctttttttttaaacctttatggtgttaataacaggaaaattctgtcttttcaaaaaaaaaagaaagattatgtgagtttcaagctgttgcagactaacaatttctatttctagtttgttaattttataattctaaagttaatagagataacttagaaacaaggttgttttaatgttttaaatgtctgaaatcatttctgaaattatctctctcgacatcttttccttaaacaaggctccgcttcttttcctgatgatgaaacagatgactgtacatagtagaataattagaaaaggaagtatgggaagaaaataaatatctgtacataatacaataattagaatatgaagtataagaagaaaatactttgcatttctgtcgctctttgttgcacatacgtttagatattttgttcatcgctgtaccctgctgaccaacagacctgaaaagtagtgagatgctcagcacatatgtgtggactggatacttttttccatgttgatttcttactttcttttcaattgatggggcaccttagcaccatgtgatcagaatgtttactctcaaagcatcatgtctgtagatgaatgcttgggttgcgtgccaccctcagtaatcagtggcatctataaatttaaacctttacctaaaaatgaatggatgagtttctggagaatacatggattctgatttttatgagatcttctttaaattctgacaaagtttgtctcataaattcagtctgtaaaaaatatttcctgccccaaaagtttcccagatagagaatttactcctaagtccttttgatgggtattgctgtctaatcagtcaaaaatcttgtaggttattgtgacccactagttttgcttagctgggtaatgcaagtggatttccaagtatcagagcagatgaaaacatagtgccctcagtttctggatttttaaaattaattttgttctaccctaaaaatcatgcaagctcttgagtccaatgttctctttatcaatagctcttttattttttaattggcaaataataattgtacatattcatggggaacacagtgatgttttgatatatactaggtatagtggtcaaatcaggataattagcatatccatcatctcagtcatttatcatttctttgtgttgggaacattcgatatcctccttccaactttttgtaactatatattattattaactatagtcatcctacggtggtatagaacactagaactctttgaggctctttgaggcacagaggcctactggcctgtagccacagtgccttctttggagaatgaccccagaaggcctgggtactgggtaccaagggacaacccagtggccacagccaggaaagggcctgcatctgtgcttggagaatcacttcgtgctgagagagattcagttttgcctcattcttgccattgccctcaaatggctaaatactagattcagagaagtaaggctgtacacccaggcataagtgcttgcattaatggacatgccacactcagtgccctacagttttgattccatctcttcctcatgtggttgtgacttacctggctggcaagtttattcatctgttctcacgctgctaatagagacatgcccgagactgggtaatttataaaggaaagaggtctaattgactcacagttccacatggctggggaggtctcacagtcatggctgaaggtgaatgaggaacaaagtcatgtcttacgtggcagcaggcaagagagcttgtgcaagggaactcccatttataaaaccatcagatcttgtgagacgtgttcactaccatgagaacagtatgagggcagctgccccatgattcagttatctccacctggccctgcctttgacatgtggggattattacagctcagagtgagatctgggtggggacacagccaaaccatatcagtgagtcacagacataacttttcagattgtttctttttcccagattgcgtgaatgttgttagggcaggcagtgtctctatgcttgttttgttcctccagtccactagcacgagcgttttcattttcaaaatagatacattcagacagagaaccctaaaagaaaacctatgcagagaaaataaactggcacttttttccatgtgggttggtactaaagttatgagatgagttaagattgtctcaagagaatttggagtgggaagaacagaggtccagcatgcaaacccatggaagaccttcatttaagggcttctagaggaagaggagggtgaccacatgaaggagtgacttgagggggaagggcagaaccagaagacatggaggtaccagtgaatgctgctaagagtcaagttagaagaggactgaattgtttcctggaggacactggagtccttagctagcgcagttctcatggagggatggaaggagatggaaggcagagtagatgtcaggccgggggtgatggagacacctcttttcaagatggtagccacaggtggatgcatgcctataatcccagctacttgagaggctgaggtgcgaggatcccttgagcccagaagttcaagaccagcctgggcaacatagaaggagtccacctcaaaaaaaaaaagggtgggggtagccatgaaggggagtgaagagatagggcaatagctgtttggggtgggaggtggaggtgtgtgttagaaccctggctgggttttcattttgtttttgttcatggtggtgtttgggagtgagtttttgtaaagatgagagacactccaacataaatcaccaatggactagaaccaattattttcagcaagtttggtagccagtcgttaaacagtgggcagctcagaattggctatggtgggaatatttacactacagaaactggcaaacacaactaagaccttaccatccccaccaaaagctagctgttaaacaggtactgcatactgctgagcatatctgaatacagatagacaggatccactgtaggcaggagagacgtgcaggagagagaggagacactgatggagcctagtctctgcagatggggaaggagataggatctgagtacttacggggagattggcttttaaaagcaggaagggttttaatagggtaagtaagaaggataagagaggagagaaccaagattcataataacagtgataattatcaaggctaacatttctgagtgcgtattgtgtgccaaacactgttctgcaggctttgcccgtattatttcctgtaacagctacaccactgaggcaggtagtgtccttgtgtcttcatagatgaggaatccgaggcacagagggtgaagtagttagcccaaggcccactggctgtcaaaccttggacccaggattggaacctgatgatctgatgctccagccctcatacatagtccctgcagtttctactgcatcgcagaggatatgcagatcccagggcaggagctccctgggacccaagctccataccaatggttcaattttctctatgaaggatgcagcatcaccctcctagcatgaggggagtcaatgagcaaggtttaaagacagtagaaaatttatgaaatgatgttgtgcagcatgtgagagcaggatgtctagaggaacacgagaaaatgcccaggcagtgtcaagggcccaggtgatggtttggatcctgactgtagtgaggccatctggtgggactgtgttcttgcagacacttcagctgctccatgtaggcccagagaaagaagcccatggagctcctctatagttaggactatgacaagtggatacggcagacgacccaaggatgaaaaaatttaggaatttaggcaatttggcagaaagagcatgattgtaataatggaccgtggaatctgcatgggagaaagtggttgtggtggcaggagggggctggttgaacttgcggttttgccccggttgaagaactacagcagtggtacttactacttaaggaggtaggagaggaggcagtcttcaaaaacttgagtgttgcaatgtgctgattctggtgaacgtgcgttttctcaatactctcagctcaagggtgactgcggagggagatagcggaggggaatcgagtgaagggtcattggagatgaggccaagggtcatacaagtggatttaaaagcaacccaggatgatggtagaagctgtgatgaagagaaagactgtgatcatggcttgaaaacacttactattaaataatatgtcatttgacttccatatctattgctgatactataggtaatgtttatagtttagttccaaaactaatttgttgtattccttagggaaggaaagcatatgcctatcttataattttttttaactttgtttagtactgactgtaggaccttttattagtttttattttgaagatttagattccttactgaacctgaaaataagtagcagcatagtaaagaaatcttaattgggtgaattttcaccaggatttagctagtcaccaaaagctgcttattgatttaaaatacaacctacagccctcctcaggtaatacagtcatacttggtccaggtgtagacttggtccaggtgtgagcatccatttgaatgacaatcacataagacttgaagcttggactttcacataagtttcagatttctgtccccttttctctgctggtcttttcattgaatcctaagagaactggcattcagaagtagtagtaaggtacaccacaggtatggtagcttattttcttaccgggaggattaaataaattctcatcctgggcctgcatgtgtaggggagctgtgtctgttattccctctctgatgcctctggaatgtctaggctcccacttattgggctgtcagctggtcaggtcataccagttgaaggaaacctttcttttcctggaaagtagcctgcagtgagctgctcatgcaactgtcttttcctctggacctcatcttgaggagaacttgctactcagttaatacaaagttcgacctaactgtggtttcccttgcttaggggcagtgtttcctcatgttctaagtgggattaattttcataacttaatttaccaggtccaggaggcaagctgcagttgctatgggaacggtaactgaatttcctggcttttgtacatttaacacatcaacagtgacgctaaagtgacataagtatttatccctttccccactttcatttccttttccctttgtagatggattattgttggggaaaggagaaagaggatttaatttcacagcccagtttatctgattagtgtgtcataatatacactcggtgagctattttcatggtagttacatgtctaaaggatgcacgtgtctaaaccacttcccacctttggtgctggttttgacaggctttctgacatcccagagatccacgtaagaaatttagagagaaaaatgttcatcctcatagcatttattgaacttaacatggctttatgtactctggtaagtgaattgcaaatttagaatgctgggctcattctcatttcttcttaatcaccatgagtcattccttcactaacattgaaaggcctatcaggttagatatctatatacacacagagcgtgattgtcagagaaatacttgcactgcatttctaggccacataatctttagcctaacatttgcatattaatgcataattgtaaaacattatgtaaattatacatggtggtgaatatattatcaaatcaaatggcctttaggggtaattacaggatgctgctatgtcaactaggatgctgcaggttgaatgctgaacacttctcataggatgaaatataacccagccagggtttatctgtgtccaaagtcacgagttgcctttcagtgtgaccctccatttttgttaaatgaagcacatttggggtcacagaatattaggaatgaaaaggataaaatcctgaatgaaaaatattaaaatgtggaaaccttttaggttggcaattaatctaaatatcggagtcatagagaaaaccccatgagtattgatgccattcggtgtatttatttcagtataatttgtttattgttcttttttatttttaaataatccatgctcgttataaaaggcagcagacagcatagtctccttagggtaccccattgctaaatgacttgattcttttattggctgcttacgtgtcccctccttgaagaccactggttgatttatcactcttctccactagtccacctcaatgtctgttttgtatatggtggccacaaaagcattgtggacggaaaaaaggacgggtgggagtgagggaggaaagagattgggtcagtaagtgctaccaccatgggattgaattctgggggcaactctagtcactttgttccactattcgttaggcctgctgtattctttgtttcaataaagcttctctctagaacgtgccttttgcattaaggagatctctactttgtggctgtatccagtgctttgaaggaaggctaactctatgtagaaacccttagttttatacagtaggtgacagaccaactggtctctaggaccagttatgtctgttcctttcaaatcccttgtatcttcaacacgaaggaaaactaccttttctattctgctagatgtccatgtaaaatgacgccccccatccccattaatctgtttctggttctctgagcactctgttctatcagtgacaaatgaaggtaaaacagtttatgccaaagcaaacctaaggttgtgacaggtatcatctttgcaaaaccaaaatataaatgataaccaaatttgggaaatcgagagtagtcattgacagaaatagtcattcagatgtgtacttggaaatcggaatcttagtgtaggagcctctgtggacagaaaccttctgtgtctctgtcctcccctctcccctctgtgcctccctcctccctagcccatcaccaaattgggccagaatccagtgacttgggacattaccccaaatttttgacaaattaatttatttacttagtttatagtataaatgaaattttgaaaaagccaatgacctaatattttatgggcagtaaaactcaaaggaattattgactgaagttttaatgttttggtcacttgggttttttgttattttttatttatttatttttggacttttaggttcagagggtacatgtgcagatttgttacatgggtaaattgcattttactgggacttggtgtaccagtgtcacccagttggcatagtatccgatagttagatttcaacccttgccaccctctcttccctcctagtagttctcagtgtctgttattctcctctttgtgtccttgtgtacccagcgtttagctcccacttataagtgagaatatgcagtatttagttttgtcttcctgggttaattcactcaggataccggcctccagctgcatccatgttgctgcaaaggacatgatttcattcttttatatggctgtgtagtattccatggtgtatatgtttggtctatcgtttaaaattccgtacacccatttccaactgaaaagaaaagaactgtgcctcattaaaagacaagtcttcactttctcagggccaaggctggaattacatgattaaactttcactttgcctcttgctggttctgtgacacctgacaagttacttaatttaggttctctttatgaaagcatgggtaataattcttacctcatgggactgttatgaaggtcagtgtgatcacagatatgaaagtccctaacaaagggcctaatccatagtaggtgcccaatccacatatttccttgtaggtatcttgtttccatcctcttcctgaggtggtatcacagaaaactctaaaagtgatattgtcagaaataaacgccaacaggtggcccatgtgtagttctgtgcctgcccctgggcaagtcatttatttatcatccctttcgcttttcacatttccagctctgagtggtaatttggagccattgggatctaatgagaaaatgaaaggcattgttaccattattgctctggtgccatgaggtctctggtgggaacatttgagagaggaagacaataataaagaaaaaagaaacctccctagaattcagctgtactgtctggggcctcctgcacatgacttcaaagccacatttccttaagtggccattaaagtctgaatctccttcccagctaaaaataatttcaaatgattaacataacagtgaatgatttttggctctgtgagatattattgatggcagttcatactgaaaagcagtgaaacacagaaatggcttctgtcacacaatgaaagaggaaaaatataacaatagtccataaaatagtttctactatgctatactagaagattgacgcacataatattagttttcagcaaggataagttatctgatttttatgatgttcccataaaaagctgacacattggccctaagcttgcattcctgccttgaaataattttaatcttccactcttgacaagcactgcaaagggctgtgacttgctggaaccctgttccacagagcatctgtctgtaaaagcccccactggagtgatattttccctggtggatcagaattggctcccttgggtttatttaaaatactcatcaatatgggaaatatattggagtgaatataaaggagccatctcagggtagttcactgagctttggaaaatattccagcatgaaactctcatctgagactctaaccacagggagacctttccttgcctcaggtggcccgagtgggacatcctgagccaatgggatgcctcgtgtgtggcgatactgtgcctaatgggtatagacccttccccagcatcccccttggtcatttcttgggtgtccccatgaaaggaagaaacccacaatgggttccagaaatctctgagaaatcctttttgggtatggatgatatcacactgctaactaaagattttcggaacatttcacaatctttgaggagtcctttaaccaagtactctcagatgaggatatgggccatgtggaatcagggccagttggtttcctagaagtgtcttctaggcttccttggtcctagagtatccccagggcttcctgcattgagattctccggaggaaaggtcatatcacactcccacagaaggaatggagccctcatagaaccttcaaaaggtgtgcatttactctcatgcagacacagaatcatttcgcgtcagtacctccagtcagtctgatgaaagcctggacagattccctccttttcctcactctcttctctgcccacttctggttggcatgtcccccaccccagtgcagcaggaaagtgaagggacaggttaggtgaagagagcaagagagagagaggttggtgcatggcctcttgccttttaggttttttaagtgaatttaaaaatctacaatgaaaatatcataagctagctaaaaaatctctcctacgagggtgggattttttaaattttgcacctctgttgctgtgacttgagtgaaacatcccagagaagatgactttacatttatatgaaaccagcccacagaatcaaaaacagtgagaaggagaagggaccttagcattgatagagtcgaaggaactctagactgaagaccttgctagcctggagtagagtttcactgttcagtagccagtcatatgtacactgtgtgtgagtgtacatgcatgcacttacctctgtgcacacatgtgtgtgcctgtgtaaagttgccctttgtcttttcttcgtagcactgaaggaataacctttttctgtaaccaagtcctgccaagttctttagggttaataacatcttgctctttattaaatggtggtaatggtataagaattttcaaatggtgttagctgacacaataggaagttggtaatattatggcaatgcacaaatgtaacagaaaatgttttctggtctgaaaatagagatcattaactcagtgaactgccagtactcccctcctctaaacccaatttttagatgaagcttggaaatgtgaagagaagtgttctcactaatcaacccagaggtcaattcatggtgggcatgtgcgtgtgtgtgtgtgcacatgcacacatctgcgttgaaaaggacaaactagcttctcctctactaatgatgctctgaatttgctgggctaaggtggtgttactgaagtggataaagcttctgtatcttggggacatctgaatgaaggagtaatgaaggccttgtaaagaacaaagctcatgaaagcatgaaagaagctcttgtgtagattatttcatgagaacctgatggcttaaggagaacttgatgtcacttcaaaatcattttcccattttctacctggagtgagaggtggtaggacacatctaccccacaaagggcaggctgtgccttctggtgatcactaagggagtcagtcttctaacacttcattctctttaatcctataaagttagacatattcctaaatggttcttagttttttttttcaaaacacatgacaactgtgtaccacaatatcattgattttaacatcttatatcagagtcagggtgtaaagcccgccacaaatgtattaaaggaaaaaataatgtaaaacctgcgattggtaatataatttcccacaaaatgattagaatttatttctgtctggttacatgtttgttttcatttatttaacaattatgtgttaagccccctcttcctcatcttttctatattatacctaacctactaaaaatataatacagatatttttgagtacttatcttgtgttggacatttttgataagaatttttacattaattatttaatactgaagccatcctatgaaatagatactatcttcatttccatttgacagatgagagaacctattcagaggtgcagtaactggcccaagatgccccagctgaaagtggaccaaatcagagctggaactcaggactctgaccaccaaatcccccagtgggctcccctgttcttgccctgagtatgtcattgtatttctccccctgccctccccaccatcacatgcacactcacacaaggatgaaataggctgtttggatgatagacgtttccatctgttggtgccagggcacctttcctctaagcgttcaaagggatcctgcccttggtgcctttcagcctgcttttcaagtcaaatctgtttgcttggaaacaaccagaggaagactatgcttctttaattttccatgtcatccttttcctcttcaaaaactgatggattaaataaactcagtttgtggtagggatatcctgtcctcttttctgacagtcaccgacactgcatcctaatggagcatgatctggtttaagcttgttcctgggagctctgctttgtctaagccaagaggttgcagtaggaattctaaaggatggtgctccaagaattatttatctcgttgtgaactgacatgtgaaaagctgaccctgcctggtgcccctgtcaagaaagtcacttaaaagaaactgcaactgttgttgctttttaatcactgcatttcttccctcttgggtacacaaccttgtaaagaactggctagggatctatagtcaataaaaatagcttgtgtttataaatcaccttttccccaaagtgtgagaacgactcaacaaattttactagaactaaaatcttcttgaaatattattgaggaaagctggaccactgtaaattgtaaattctttctgggtaggattctgcctttacatttctcttgttcttcttaaagcaccaaatgtttctgaatgtcttgtgattaattggttcctaattaaagttaagttgaatgctaaatcttaatgaattatatggaataaaacatgaaaatttagggctgcccttacagccgagactacagataggacaatctcccttagaaagattgtggctgcccactgtacctggatggtgtaactccagggtgcgtggctgacagggacagtgaggatgatggtgcccactagaattggcaccactcaactggatgcagtggtccagttgtgggtactgcaggacccaaggcttaacacagatgtggtgagcatgtgtgttgcctagaagccttttaccctcagaattcagggagacaaaataaaacgaatgagagatttccacccgcaggagggctggagctaacatcctcttgaacattgactcacaagctgattggggcagatcctgcaaaaagtgaccacatttcattggctcttgggaggatatttgggcaggtgaatgtggaaggggttaggtagcttgactgctacaactttgattctagatttacacacatacttgaaagtctgaagtttgcataattatggacccaggagtctttgtttgtctcctgctgtagtcttaattgccaaaagatgaagcatttgaggttcacaaagggaaatcagcctgcccaaatccacaggactcctaagttgttagagatggcattcacccaaatctttaaagcgtatgttcttcactgtatattctgttgcttctagtctggacagtgtcttttctatagatgcctcagctctttgtttcttgttgtcatttctgtatctgcatccactggtcacagaagccatgtgcacacattcattttaatgtccagtgtttatgttgcaggatgagtcacaaccgctttttgacatggctgaagggagacgtggatgtagtgggaaagctaaatgataagctttttagaaatgtgttccctgggtgatggaatatgctcagtgctattgtttttaagcagtagcattcctgctaggacaagaaatgcaatacatatgctaatatgttcatgaatggttggaaagatgtttgaatcaaagaagcttgtctgtttcacatttacagccaatggaaaatgaaatttttatagcaggttttcaatgaagttgggagaggtgccagaaactggagattgctacatagtagtgccttcctctgaattactgtaggcatgcatgctatctacaaggggttggataaaatggctgccagcttttttgaaacccaaagattctctaaaatactacatgaaatagacagatctctcatatacattgagtgtagtatgaataaacagaagtttttaaatttaccttgaattgtgattatacaaaatgataaaaattttcacatttttctcaagatttccttaaaatatttaatgaaacattagtacatttcacctattattactaaccccaaagcaaaatggccccttgaaactgtatttctttatgatagataacacacactaccttcttccttgcagtgccgttcttatgctcataaccaatctcccattcttccaagatctttgaaaatacaggccatgtcttatgcatcttcttggtaggctgttagttagtgtatgctaaggggctgagggtgaatgtcatcattatcacagtctttaaaagtagattctgaaacttgccactgacatttttaaatggattttggaaaagactaggttttgatgattaaaagagaaagtaacaaatactgggagccattttaggtatactaaatttaatttctaccaaaaataaattttttatgtcataaatattaaattacacaggtatcctaaatatagtgtatcttggatttagcttaaggacatgtttacagatttctgagaatcatttccctggaggaagcatgagtctacccttagctgcgtattttttaaagatttgaatccataatctgaataaaggaatgcaaactatacattcagactttttaggataccccaaaccaagaggagtatttatttcataattaaagattttttaatgttctagtagactgaaaccatgggacaaatatcaagatttgtttaatttgatataattctgtagacttatatcaaataaaacatatcaaattctatagacttaatcaattgcacattgcatacatgtagaactgaggagactttgatcaataacccgaggagaaaggacttaagcatttttgttgacaaccctgtcaatctaagccatggtaaatgactgctaagtaaaaccagtgcagtatccggctacactcacaaaaatatagtttccagatccaaggagggagttaatagtcccgtgataaatatacttgcctcagataatatctggaatattaggaatcattctggggcacaagaacacatccagaagaaggtaatgatgtctggaagcaacagtcgatgaaatggggtatgattagccttgagtagggaagtttaagaggaaacacatgaactctcttcaagtatttcaataatcatcaagtgaaaagatatttgacttactgcatataactctagaagataaatcaggaccaatgtttggaattgttaggaaaccagacaatagtcttttgttgttgttgttttctgtgtgtgtgtgtgtgtgtgtgtgtgtgtgtgtgtgtgtgtgtgtgttttaacaaatgaaaatgccctgcaaagttgtggggcacttctcttgtgtaaccaaaattacatggcagtctttcatggacattgctatgattcaagttagagtttcctttttgtcttttgatttttggccatgtgcatatgtactaacttctcacaaaataaataacctaaagacttttttaaatgtgttttgtccatgtctggaaatgaatgcaggttcttagaggaataatctgacaaaagtactttcagggatataaaagcagagaactggattctttctgcctgacacccacccaaccccaagacatctgctgaacattctgtaaatcacagacactgctatcaggctttctttatggaagagacagattgcatcattagggagcctcagacaaacacgacctggggggttggtgctctccttggtgctgaacggaggctgggcctttgggcttcctcccaggctaaggttggccctaaccttatccctaccctgcagcaattcaggttgcacctcttgcctgtttatctgataattctgctgcctttgctaattccagctggtaccgtgactactttgattccccattcagtgacctctctctcaagaaagatgagttatgcaagaggtttgagatttggataaggagctgtgtggcaggtgaaacatcacattcataggtctatattgacttattaaacagttgcgtcttctataacttccagagtcgtcccatggtatacattcattgaatcttagtagacttagatatgaaggcaaatattggatatggtgggttgcagcctgagaaagagggccttaagggttcgatgagagctctgatagaatagatacaaaaattggaatttttaaatgttttttatttctctaatacatacaaagcactgttcttgatggctggagatagcagttctttaaactaacatggctttgcatgaaatgaaatagctttgagtaaatgtcaccaaatgacaacaggaataacttgacaacaaaagcagagatcggatgaacttggcctgtctggagtaggcagtcatattctcctgataagaggagaacactgctgggctagcagggaaaggtgcttctgcccttctgtggggtttcaacagacagaaattcactggtgtgagcattgcttcccaagagcccaggcaactgggattgagcgaagtgaaagcatcttggagatctcagaattaaaaggaagaaaaagagatgctaaaggaaatgaaaaacatggatcataagggaatgaaaggtctgagaacctctgctgtttaatgacctctgccctacagagggcagctttctttgaatcccatgaacaaatatgacaaaaaaagtcttctgacctgagcctctggtttatctaattgtcctagagagaaggatacagcaggctcccaagaagaagccacatttggggcagagcagctctgcacctttcacatatttgcagattagcttttataaaaacctgcacagaagacaaaccatttaagtttcataaattatatagccagattttaatagcaaaattccttgaggaaaggattcatttaaagtagctaactagttgtaatttatagaacagtgttacacccaattatgtagttagtaaatgctttccacagttcatgtgagtttggtagaaagagagacaaaaaaaaaaacacctttaagtataagggtaaataaaaacaaagtttcaggaaacatagcaagtgaaacatttaatcctcagaattcatcaggtgagattctgtgattaatatttcacagaaagaacttggaaagtgaaataattcatactgtctcataatttaagccagtcttttaatatctggtcaaactcaggttaagatttattagtcttacaaaaattatccaaattaggaagagtcactaaagaagcagcccatttattgaatagtttaaaacctttttatcctgagtaaaatattcttcagagctaaagtgacccagtgtacatttgcaaagctcttattatcatctcacccaacatgcataagaggccaagtagacacggttcattttttatcacttctcatttcttctagcactgcagttctttccaaagttttgatgctacttatatctattctgaacaaaaacaatatccagtcatttgtttcacagaatggctcagatcaattactatgcatttacccaaaaaggaaggaagctgaacacgtcaaagaaagaattcttatgggaaataccatagtttatgacagggcatcctgtctgaagcccttagaataaaccatgatgccttccatatttgttatcttctgtggttaaattgtctccttggatggtcattagccttggttggagcagactaaatattaggaacaaatgtttgacatgtctttcactgaagtgcagataaggttgtgattaaaaaaaaaaaaacctttgaacttggcttctacatctatcaaatagggtttttttttttggtaattgtatgtatttaaggtgtaccacatgatgttttgaaatacatatacatagtgaaatgatttctacagtcaagccagtttggcttatttcacatagttaccttttgtgtgtgtgtgtgtgtgtgtgtgtgtgtgtgtgtgtgtgtgtgtgtgtgttcagagcacctaaaatctactctcttagcaaatttccagcatacaatacaatactattgacagtagtctccatgctgttttttaggtccccagatttgcgtgcactcccttgcagagttgttgtaaggcttgtgcaccatagcaggggaatggctaattcttggttttctttcaaggctatgatttgcactattaagaaatagaactgggggccaggcatggtggctcacgcctataatcccagcactttgggaggccaaggaatcccagtacttggggaggccaaggtgggcggattacctgagctcaggagttcaagatcagcctggaaaacatggcaaaaccccatctctactagaaatatgaaaaattagctgtgtgtggtggtgtgttgtcccagctacttgggaggttggggcaccagaattgcttgagcctgggaggcggagtttgcagtgagccaaggttgcaccactgcactctaacctgggcaacagggcaagactctgtctcagaaaacaaacaaaaaaggctgggcgcggaggctcacacctgtaatcccagcactttcagaggctgaagtgggcagatcacctgaggtcgggagttcgagaccagcctgaccaacatggagaaaccctgtctctactaaaaatacaaaaaaattagccaggcatgatggcgcatgcctgtaatcccagctactcaggaggctgaggcagaataatcgcttgaacctgggagtcggaggttgtggtgagccgagatcatgccattgcactccagtctgggcaacaagagcaaaactccatctcaaaaaaaaaaaaaaaaagaaacaaaacaaaactggggagtaaatttttatttctgccaatcagttttacagctctcaaacacctggatatcatttgcctctggaagtcttccaccttcataggaaatctgtgatggacccctctcctcctgaagaaagcctacagagggcagctttctttgaatcccatgaacgaatatgacaaaaaaaggctctgacctgagcctctggtttatctagttgtcctagagagaaggatacagcaggctcccaagaagaagccacatttggggcagagcagctctgcacctttcacatttttgcccatggtttcctttggaagggaaaagctgaaatgcaaaaggagaagagagctggacgcatcacatagttttaattggtttcgaagggtcaccaagcagaatcctttctgtagcagaatagcttttccttgggagctggtatggtcagagaagaatcccggcccaagagctgaaccaggggccctttggggaaagggcctggggagtcccaaagcggcactgtccctgctcggttgcaggcagtgaccctctccccacacccgactcagtgccagctgtgtcctgagtccaaggtggtacattaggtgcttaatgtttatcccttaacaagacaaacattaacagggtggtcgctcttaaaacatggccttcccattccagtgggaagacagagaaaacaagttaaaaagaaattaaataattataaattctaccaagttatgaatcaaaaagaaagcaagggcttgctttcccagtgggtctccctcaccacgtcacttcccctaaactcattgggaatcgccatttccattctgttttcatgtctgtgaaagagataaaaagctgcccacatcaagaaatgtaattcaacccctttcagcaaatacaggatattctgagtcaactgaactttaactatccaaataggttactgcaggtacctaggccctgtttttaagtcttttaaaggacattggctttgtgattttgagctaaggtaatacataagaaaacatcttgaaaatgttaaaggaatcactctgaagattgtctcatgaaacgtgtttaaacaagtgtttaggctaagtctttccatgagaacgctcaaatatacattgtttacttgtttggtttatttgccctgaataaaataaacgatccatgttttcgctttagagttgcctgtgggttaggtgggggaacagatctcaaaacagaggcttctactctctggtaccaaggagtcagagtcttgttcagcatttaaagtcacagaatagtcataatgattatgcaaatgcacaggaatcctctttcatttgctgtcttatgaaagaattggaatcagttatataatgtaactggttgccttattttttataatttaagggaatttattttataagtgcgtaattggtaaaatagatttttatgctagattttactgtgtaaattagtgactctcagtgagtgttggttttgtgccccagggcacatttggcagtgtctggagacacttttggttgtcccaacttgtgggggtgctactggcattcagtggggagaggccaggaatgctgctaaacacccttcaatgcacaggacaagcctccctctcaacaaagaattaaccagctccagacactaatagtactgatgttgagaaaccctagcttaaatcaatactgttttgttgtaaatttcaagatgtgaagatttagttctacaaggcaaaccaatgatttatgataagagtggaatgatttttcagataaaccatgattgtaaatatttaaggtactgacatattctaatcaaagaaagcagggtttttttaattttaaaatacgttttttcaaaaaaaaaactgtcacaattttttttactaggaaaattgggaaagagaaaactagtctgtactgtatgaattctttcctggagatacttatctgataggctcaactgaatgcacaaagatctcttgctgacaaagagataatttatgtactaaaaattatatactttatttagggaaaagcctttccaatgcatacacagtctgtttagccacaattcagacacgtttgtagtgacaagccatggttacgctttatggcatttaactagaataagcccaacgacccagtcaggaaaagaggtggcaactgtgttgcagccagaatttccttactcaaaaagatctggaatgttaatgtattgattctatggggaacaggtgacgctggagtagctgaacctgccctgctgggcattagtcctcccttacatatctctcgtgcttgtaagccgaaatgagcccagccttaactggggccaaggtgtcatgtcagtccagttttgaacctgaatccactgttgtggtcagcccagctgtcttgcttaggtgttttaaagcaaacaccagctatagagagagaaggaaaggcagagacaggaaggaacaccgattaatgagctatttctgatttaacaagctattctgttaaattggcctataaaatgaaatgccaggtcatttgtattcaacaaacttgtattacagacaaagtgctatagggtggggacagaaaggtgagccagccatagctctatgcctgtagacattcattttggttcagctctttctctttctcctttacaagttaaataagcaacaacagtgactacctaagaccaactatgacatctttctaaaaagtataatatttggaaaattgtgatcctaaatcataattttcttatcagtgaatctggcttgtaaacatagagggaaaatttctatttcattagcaagcacatagtgagttgttccagtgtctcccagtgcctttcacaagcttgaaaaggatttgaaaacccctttgttctttgtactggaatcacttagcattcccaggttcccttaagaaaaaatcagaaggtgaatttgtgttagctgttattttgctccagaaactcccttgatctttcaaagatgccccttcttgacctaagaaaatctgatgcaagatacacattgtggccttccccttgatccctccatgagtttcagagaattaagattaacggcagacatttccttcattctttgatttgtctcatactttgatttctttttgttttgttttgttttcatcattctcattcccgtgtttgattcaccaatgattgcaaaatatcaaaatataaaatgtaaactgctggtctaaagaaagaaagcatactggggttctttctttggccaactcaaagcctgaaaagtagctccaagtgggtcagttccacactgtcgttcttttacaggaagaccactgggcagaggcctgggctttttttctcattactgaggactagtatcttgggattccttatgagcaaaatgatgcttgatgtttctggcagtgtcatctgagatgttctgacttacttatatgtgtagaaaagcagtttctctctttcagaggccagccctgagttagtctattgaaattgtgcataataattactggatagttatacatattctctataattttaaaaggagtcaagaaaaaatttgttataggcaacagtgaaagatcaactgactctttcttggcttatttatattcaggaagcaggaagattgtgtgtaggtaaaggtggatatggtgattataaacttaggattgatttagattttggcaagttgcttctgtgggcttaatccattcaagcctgcctcccatgagacagcctgggctcaagggccagctgggtggaggagcaatcacgggatttgcaggaagcagacagctctgcctacctaggaaggctatccttcgcctctcagagcctatgagatagggataattctaaacctcatagtggttgttatctagataatgtgtggtaagctgtggggaaatgctttgttaactctgaagcattgcatgaaagatactttccatcatagaaatatagactgtttcataatcctagactattttagggaatctgggaaaaggaagatgtatttaactattttccttttctcttaattcctttgtggaatgaggcactgcataaatatatatttttttaaaaaacctcttcttcctcccaagttcaaataagtggtatttttacttcctctctactaaaatttagtagagaaaagaggaaagagaagttgctgctgagcaaaagaagtgagcaaaggagaaacatttttagaaagtttttgaactattgtgatttgggagaaaaagagaagttttttaaaataataataacatgccatataagttctgggcaacaggcagataatgcaaatcctcagaatcttataccactaaaaggttttttagtgaaagtttgtttttcagtccagttcaagaaaaacacaaagagagcacactgagttcccatgtcccctgcatcatttctcctgttattaacatcttacagcagtgtattatattcattaccattagtaatagtaatagtagctgaagtccatacattattcagatatccttagtttttatctgatgtcctttttgtattccaggattccacccacaataccacattgcatttggtcattgatttctattccaggtggtctggattcagtctttactggtagtatgcgtctgtgtgtaaaagtagttactctttctaagggtctctattgacgatgctagtaaagcattcatagcttcataccggcgtagtaatattaacctccatcccagagcttagctgtatagccactttatctaagcaaaacataggcaacacctagcgtggaaattaaaaaataaatagcccacagcagccacagcaagtgacagcacatagctgctaacattacttctctaattcatactttattaaagaagggaagactagggaaggggaggacttgaggatggaagccaaacaaacatccaggcttggatgttacatttgagatttctgtgagacatgagaatgcagatagttggaaccatgcatctcgctgcagaaagagggaggagccaggagactgggtaagagttcatcacccagagagtgagaacaggtgttggagcaaagaccagcagactgacctccaggtttggacattaagaataggagggggagacagtgaagcaggcacccatcatagggagagctgagagagagtgccgtccacatggggagggctggtcaccacctcaaacaccgtgttgggcgagtgagatggtgacttaccaggcacccctggatttggtaatgtggagatggtgggaaagctacagctgcctcatttttaactgaagacaataatagtgcagacctagaatgttgtgagtattagtatataacacatgtgaagtacttagtgcaggaagtgtacactcacattagcttttttaatgggatacagtttacagatgactttcatgtgggttggctgctctgagtcttccatgtgatctgaaagagaggagtggccattacaatcatagtccctgctgactagtaaggaccctcaccctctggctgtgacagagttgtcaatccatccctcattgagcattttcacacctagccggagcatagcctttttgctgtattttgttttgtacaaaaataaaaacaaacctgtttgttgtaatagttttttaaaatgagtgggctctagagcttttcccttataaataaacatctcatgcttcaccctcctcctcgttgagtctgtctgacatgtataaaaaagactacttcattatttcaagtcttggggaatggagatggcatcaccattataaagagacagaggaacttggctcatgaacctgaggacccccgagttcttgatctaaagcaggcagcaaaggacgcctgagttcttgatctaaagcaggcagcaaagctagcctttggccccagttccttgtgtgctgggctccctgctctgtgtgactgtcttgctgccacaagttccaaactctcgttggtctccatcctgcctgcacattagattcaccgggaacctttcggataatgttcatgttctggctcacactctgattttctgatttaattcgtctgggataggcccagacattagtatatcattgtaatgaagtttattgagatataatttacacatagtagaatttccccttttgagtacagttctctgcattttgacatgcgcgtaggcatccattcatacggccgactccacagtcaagatctgaccatttgcatcactccaaaacctcctgtgtggccgctttgccatcctttcccccaacacctggccctggcagccactcctctgctttctggggcaccactaattcttaaatgcaggtgatttttaatatgcaactgagtacagctgcctggcagcctttaataagatgcttggggcacagggacgagaactgctggactcagttaacacagtacaggatcatccatcagatgatcttagacttaggctttcttatggcttttagctgagacaagacagttctattgcccactcttgctgctgttgtttctttatttagtggtaattggaagggagaagggactggagtgagaggaggctcccggcattgtctgcggagagcaggcctcctgaacctgccacagtgaacactgtgagggcaccagatatgtatgcagccattttttaggtgactggcactgttcccagcaatgtggacacgataatgaactacatatacagctcaaatggggcttgcttcaagtgcatggagataggcaatgaacaaataaacatacatgcaaagaagaaaatatcatgtatcagaaaatgtgatgcgcagaactgaatccaagtgatattccagagtgtgggggctagtttagattgtgagtggcccaggagagcttctctgaagaggttacattgacgctgagacttgaatgttacaaagaaagcagccatgaggagttagtgaatattccaggccaagggaacagccagtgtaaaggctttacagttggaaatgaggctcatgggcattagaacataaagaacgatgttctcaggatgttcaggatgtctcagattttggaagtgaacgtctggtcactaatgacccatttctactgtcttctgatagagcctgcatcttttccatacatattcccagtccctacctggaattacagctgaccgggcccaaagacattcagctgtaactgtggcatcactcacagggcagttgagcaactctgttttgggctgatgggctcctgcagattagcacaggaaagaaagaaatcagaattcaactaagagaaatcagtgcctaccagcagcagtagggttaatatggaaatatttaattcatcactacaatgtgccccatacaaactgggtttaaaaaaaaaccatggctctgaatattcctttacagtgaaatgtaaaattatgaaactcaaattcccagtgcatatgtaacactcactctttctttctctctcttcttttttttttttttttcaaaagtcagaaaaacagagtctcactcaaacagccaaagttggagttggagtgcagtggtgggatggtttttgtattttttttttttttcgtagagacggggtttttccatgtgcccaggttggtctcaaactcctgagctcaagtgatccacctgccacagcctcccaaagtgctgggattacaggtgtgagccaccatgcccggccatgtaactctctttaacaaaatagggctgtcaagaatacactaaaacaattacatatatcgtgaaatgtaaatgatgaatctctctacttttgaaagtgtaattagcgacaagtgtttcatcaacatagaaaataaggtcaagaaaacccgtgtccactttggtgcaactcagtgaatgagaaagggtgccgtcgcagggctcacagccagtgttcctggggtgggggttgcttttctgccacgttaactcatgtgttcttgttggcaaggtcaccaccgagcacagcttgatcctcatatcttcattctcctttcttctgccagtatttcaggggctgtgacttcaatttaaatttatgcatttattttacacgtatgtgataaactcatcctttttgtctctggtgatacttttcaaacagtgtctccccgcttccttgctccccacttcctcactctgtctgtgaatttctgggagatgttggactagtgaaaaaaaatacaaaaacactcactcctgataaacgtgtgtgtctttcctttggcacacatagaccactgctgcaatcccaactcggggccacagtagatcagtgaggtgggccaagaccttccagtttgaaatagaccttgtatatttcagggtcctctagtctgtccatgatgaataaggctttatgttgttcaggttatggctataaaatgacaaatgatcacattaatctttgtgttattcctttcccctaaggacattatagggacagccaaggtcagtgcaacaatgtagcacgagagtcgtttttccctctttcctatagagagtattgacattacctattgcatatgcccctcttttctctgatctcaacttcctactcccatatagcttttatttattttattttattattatatattttttgagacggaatctcactctgttgcccaggctggagtgcagtggcatgatctcggctcaccgcaacctctgcctcctgggttcaagcgatccttctgcctctgcctcctgagcagctggaattacaggcatgtgccaccacgcccagctgattttttttgtatttttagtagagacggggttttgcctttgttggataggctggtctaaactcctgacctcaggtgacctgcccacctcggcctcccaaagtgctgggattagaggagtgagctgccacgcccagccccatatgacttttagagtgctagaacgctaataatacaggaataagggaggcacatttgctgcttatacccaccaggatatagctgatgaggcagctacataatgccctgttcctccttcactgatggagaaatacactaacaggcagtaacattgtgcgtgaaacatatactactttaggtttgtgaccggctgtttttgttccactataaacaaagccgtacactggggaggagtggggatttggcatccacagagttctgcgtgtcacatcatgcacatgctgatggcagctgggtgctcctatgtttacatttttgccattcctgtatcagttaatgtttttgtcataatgatgctaagtcctttacatgggagttctcttctgttggtcttgcattggaagacctattatgcaagaactgtttgtacaatatcacagctacttttgtccttaacaaagtcaccatataatcattacccctgggggtaatcaggaaaatgatcccaaactatttgtttggctttatttagttttgtgctttgaggatggtttttgtctagtggtaggtgtctaagttgaacacctgtctctctaaaactactgtccagtatattagccactagccacaggtagctatttaaatttgaattaagtagaaataagtaaaattttaaaattcaatttaattccttagtcacactagccccatttcaagtgctcagtccgcacacatacacacacacacatacacacaaacacaaacatttacattatcacaggaaagcctactggacaacattgtaatatactgtaatacaatgtaatgttacattacagtactgtccagtagaattttctgtgataacattttaaaaatctgagtaaaatttaagaagtttacatctttgcactttttaattattctggatcagcacctgtaatttatcttcaatcagcatgatgttgctcatgtagagagagattaattcatgtcaacaaataaaaccaacaattttatttatctaaataaaccgtgtgaattttaagtatttattgtcgatagctaggaagaggaattagacacaggctgaaatagagtcaactggcctcaggctaaaaaagaaaattttcccctgaggagaaggtgcagactgaaacagcttctgcttccctgtttccataaggacaatgttgaagggtttgtgtgctcatatagtgcttccttctgatgctgtaactagaaaagtccaaactgccctctcagcatttcagtaccacttattgttgagtcagtattaagacaaactggaatgatagatctgttctccagttttgtggggaaaggaacaaagacacagtttgctgtgtgccctgcccacgagcaggagcctgctagaagagaacctgcccttgtatctccccctcctcatggcctgcagtcagagtgcccaggaggcttctaggcgtcaaagcagctcttattattatggaaagaatgtcagcattttgaaacagagaaaaccagttgacctcaaaccatggcatgtcataatctgtacattctgccccttgataagtatataatgtaaaggaccattcattttgtgagcctgtttgcatccatgtggttgtccttgcaaactaaatcttttttttttaaaaattggagcagtgactcattttctaaacttcataaaactttttctaattctttcaagaaaaagcatgaatctcagagtttccaagtgctactaacttaagtgtgtcctccctccaaatgtatattttgaagttctaactggcaatgtgaaggtatttggagattgggccattaggaggtaattaggtttagatgagttcacaagggtggggccctcataatgggattagtgcccttatcagaagagacaccagggagcttgccatctctctctttctaccatgtgaggaaacagcaagaaggcttccatctgcaagccaggaagaaggccctcaccagaacccaaccatgcttgcaccctgatcaagaactttcagcctccagaactgtaaaaacaaagaaattcctgttttttaagtcacttagtctatggtattgttttattgaagcctgaacaaactaatacactaagtttggaagagtaatattggaagaaaaatctctaagcaagaaggaagcttgtcataccttttcatttccaggctctgctactgagaatccaagatgtaggtgatgattagaaaattcaaaaaaagcaatgacttttatggtaagaaggaagatcaaaaaatctgtcccaaaataccttgagcatcctttgggtcactggtgtggagttaatttcttgcctccacaaggcttctattaaaataagagaaacagttctgggaaactagggtgccccctgggtgaagctccaggggtcatgagcttgcacaggcaggccagcaacctaaagcatccagggacaggatgaaggtggggctgagttcaggttgttcccccttaggtgggagccaagtgggcaggagaaaagtcaggaacaccttgagcaagggagacatgggaaccaatgggatggggagggtgaggatgaaggtggagctggaggctctgggaagttgttgtcaaggggatcgggaccaatgcttgttttgtttagctttcagtgacaggatctgtacatggtttcctgattgaaaagcacagagccacagagacagctaaggaatatatctttttaagatataggggatgatgggcaaggcaggtgcatccactcaaacatggtatctgtgttaagttggcaccgtgatccctgaaaacatttgtttcactcttgattgcagtcttcaggctgtctttccaatgtgctaccttttccataacttccatagttcttttatttagtactaaaattttaagggtgtcagctgcccagattaacaatatcttgaagccatatacattcacgtgtctgtgtgtgcatctcagtatcattcattcagacaaaatgaagtgatgtcatgaaacaaaacacaaagcttatgttttgggttggtgagggagtcggactagtgagcaattctgtgagttctgatacaaaacttctgttgaccccagctcacttgatactagccccttcctctcttctactctgtctgaattttatttagaacagagtttgcttcacttgactttattgtcagtcccttgctaggggcagaaaacctgtgcccagtgtgctcaggccttccgatggcccgattcctggcactgcttcctaagtcctcaccacaggaaatgtttgtgccttcctaggtagcagctcaattattttcccatctcctctgtcataggggttagcggacagagttggctggaacccagtaaaagaatggccgatcactttttggcttgacctggggagggaaatgcaagcatcagtgtcagcctgtaataaatgaaaggttattgaaaataacagaacaacgtgtggctcttccacataatgcacaggaactgttggcattgaacatactcacttgaggaacttcttcatctcagattttctttcattaaaacattaaagggcatattctagtcttttatataggaaagtcaccatttgattggctgtgagtttaactagtggatctggaaaattccacaaattaactttcaactcctcatttattatttcattagaagaatatcttttattctgtagtaaccccatggtatttctctttccttctcattatttctccacttctttcctgtgcctggctcctcatttacactggccacttcattctcctgtgatttctatgaactcaagcttcagagtgacctttgtttcttttatcttctcttccacataaaatttgctgagaagttcttttgaatattttcttgccttgggagccaaatcctggtgctatcacttttgggtcattggatccttaacatagctttcctccaactccaatatcttgcatccattttaaaaagaagatgaaattccggcacctacatgtgtggcccccattggtggacttcctcctgatttcccatcatttcctggaagtaacctcctataacaatcctaggccgggcatggtggctcatgcctgtaatcccagcactttgggaatctgagttgggaggattacttgaggttaggagtttgagaccaccttgggcaacatagtaagaccccacctctacaaaataaaaaattttaaaaattgactagatgatgtggtggcacttacctgcaatcccaactactcagtagccagaggtgggaggattgcttgagccaggagttcaaggctgcagtaagccaagattgcactattgcactccaacctgggtgacagagtaagaccctgtcttaaaacaaataaataaataaattagtaacaatcctgacatttgtatgatattaagcatcttcaaaggtactttgtatacacatgagtttgctagggctgccatgacaaagtacagttgacccttgagcaacatgggtttgaattgcatgggtccacttatgcatggttttttttttcaataaataggttggaaaattttttagagatttgcgacaatttgaaaatactccaacaaactgtgtagcctagaaatatccaaaaaattaggtatgccatgatgcatgaaacatatgtagatactactctattttatcattcactaccataaaatatacacaaatccattacagaaagtttaaatgtatcaaaacttaaacatttacagaccatacatggcatcattcacagtcaagagaaatgtcaacaaatgcaaaggtgcagtgttaaatcataactgcataaaattaactgtagtacatactgtatgactaatggtttcatagccatctccttttggtgttgcagtgagctcaaatgttgcaagtatctgcttaacacaccatgtgatggtaatcatctccagataaagttttctctctggtaaattgtgtattacagtgaaaaatgatctctcatagttctcttttatttctcatcaagtttagtgtaatcctttaagccttgaataacatcatggacccataggaagtaccactaatcatgctggaagtgcttccaagaagcaaagtcatgatattataagaaaaagttgaattgcttgatatgtaccaaatattgaggtctgcagctgcagttgcctgacatttcaagctagattaatccagcataaggaccattgtaaaaaagaaaaggaaattcaggaagctgtttctgcagttatgcagcaggtacaaaaatctttcactttttatgaaatacgttttaatctcatactgaaaatgcagcttttgtgtgggtgcagaattgctattagaaaagcatagctatagacttgaatatgatccaaccaaaaaagaagtcattctgtgacaacttaaagcaaaaggaaggtgaaagatcaaaatctggagaatttaatgccagcaaaggatggttggataattttagaaagagatttatctttaaaattgtctagctaataggagaaatagcttctgccaacaagaggaagcagatgagttccaaaccgccattaagaaaatcattaatgggaaaggatatctgcctgaacaggtttttaatgaagacaaaagtgccctatcatgggggaatggaaaatgccaccaaggaatctattggaaaggaagagaagcaagcaccaggatttaaggctggaaggactaggttaactctactggttctgggcaaatgcatttgggtttatgatcagggctgcctttatctataaagctgctcacttccaacccctgaaggaaggagataaacaccagcttccagtcttctggttgtacaagaaggagctctggacaaaaagaacactttttctggattggtcccatggatatttgtccctgaagtcaggaagtaccttgccagtaagggactgccttttaaagttctttccatattggacaatgcccctgccacccagaaccccataagttcaaaatcaaagaaactgaaacagtctacttgcccccaaacaacatccctaattcagcttctagatcagggagtcataaggaccagtaaggcttttatctggtttactttattgtaataatacaatatataatacatataacatgcaaaatatgtattaatcaactgtttttgctatctgataggcatctagccaacagtaggatattagtaaagttttgggggagtcaaaagttacacatagatttttgactgtgcaaagggttggttcccctaacttccatgttgttcataggtcaactgtaccacagactgagtggtttaaacaacataattttttaaaaaaatcatgattacagaggccagagtctgagatcaaggcattggtttgttcctggggcctgtctccttggcttgtagatgaccatattctcgtgtgtcttcaaatgggcctccctctgttcatgtctgtattgtaatatcctcttcttataagggcaccagtcctattggattagagcccaccctgttgtcattttaacttcactctttagagaccatttctccagacacagtcacattctgaggtactggggttaggacttcaacataggaatttgagggtggaaggtcacaatttaactcatgttattacacatttttttccctctgatctctcaactgtgtgaagttgtgaggaattagaagtaattcatctcctaaacgtatatctgatttgtacatgggaatacaatgtaagtaagtccactaatgctctaatttttttttggcacagcactgtctctcttatcttaaacctaattgagagagttactagctaactgttcgcttcctccctttatcttctgttgtctttattccgcacccctgaagattctgaaccacccactcccttctgcctcgggcaatgaatagtctttctcttagtttcctccacatctcttcgcagttctttagggatcaattctgatgatcttagtctccagtattcatgtccctgatctcacatcatgggacagatttgccttgcaatttcttttccaaattctgtattcttatcagaaacatctgtcatcaaaacactgcatttgcctcatttcatcagatattcagtgtaccgggacccttgtagccctactccctgggaagggacattcaggccttgacattggaatgctggcttgctggaaagttataatccagtgtctgtttggtgtattttttttttttttaacactaaacacatggcctagacattggttttgcttcattttcgctcaacatttatgataataaagctttgttttcatagatcacttatctcctgaaaaattcacactgccgtgaacacgatccagccttgcagtgtgtctcggaggtaagtaggtggcaagtatttttatccccttttattaaagcataggcagagctcactgcacaaggatcccctggaagggggaacaatttggacttagcccgtctgcgctcctcctgctccgtttatttgggtaccataaacccacccagaactgcacacagaagtgtctcctttgcaggcagacgtatatgcatgcatttcaatggcttccaggagacagcgattatggaatgtggagtctgaatgtaaatggaatttgagatgagcctgactagtaaattattctgaaggaaaaacacattcagaaatatgattttatcgcttctcggcgttttggctaagatgaagtgtagaagtatgatttagattccacccatccttaggtgcaattcaaatgccagtttctctaaaaaataaagccaactcttcccctggactctccagacacttgacctgtccttactttgtggtgtataactcactgcactttatcttgttgctctcctggtcagagtctatgcctgatccatctctgtggataagtactcagaaatgttttctgaagtggaatgaaaggaactaacctctgttgtttgtaactggcacagaacccaacagtttctgccagtgacaggtcatgagcatcttgaggcatccagaagattgtcgtggttggattgtcctctcactttgcttcatgctcactgcttgaccactgattattttggagaatgtctctctccttggccaaggctttgggtattataaccaagagaggatgatctaaccagccattttatcaacagcggctctgagagcccagcgttgggtgccagccctgcagagggacattgcgaagtatctttatgtccttcgagcatccctcctttccatcaactggcagggtggagcaatagcatccagttactgaccttccaggaataatgtgagcattggatgtattaggcctccaaagtatatctgtgctgctctgatgaaaggtgctttaagtagggttgcttgttaaaaataagtagtgccaattctcaggctgccccctgtgttttcctttcccttgctcccttagatgtttttcaaaggtgccaataaagcctgcaaaacatgggtaatgaaaaggaagggagagcaagttctttttgtcataagcgtgaactgtgagtcatctcttctgagtcaccgtgaacatacaaaggaagccaatcagtaggggtgcactctaataggatgtttctccaatgactcacgcaggcctggaatgaggagcagcctgaatcaagccaaacaagtatatttttaaatctggaagggcgcgcttcctggtgcaatatgatgatcagtcctacacacttacatgcttattttagcccaggcactgaaatgtgtgggcatggtctccacggagccttctcctgtggtcatgttttgttttgccagtggggaaggatgtttaatgattaactgtcactatcaagaatataatatttcagtgcaatatttcaatgtgaggagaagaataatttttgaatgtggtgacttcaagaactcggctccattgggtaaggcctgcttcacgtgtaaacatgcattccacaaacattttttgaggccctaagtactgaatatataaagacagagaaggcgtagtcctaagcctcaagggtattagaatttccacaaggagacaaaaaagcaaacagagcattggaaaagtggcagagggtcagatggagacacttagaaggctcagcctatagagaatgggcgtaaaagaatcccctggaagtgggaacaactgctctggattctgaaagacctgcaggagttaccactgaggagcgaattgagatgaggaagggtgattaaggcagagggaaaagcatgtattaagtctaaaagtcttccaaacagtttatgtttttcattattgtcttattttctcaaaattttgcaaatgcaaaattttcttcttttcccttggcaaatgcattctggaaacattttttcaagctgacccagaaaccatctcattcagggcgagtcagggtccgtgttgtgaagaggcgttactttatctgaaggattttaagcagaggctatacatgtggctatagttaggttttgatgagctcctcatggaagacagtgagggaaatggatctgtcccgagactgggagaccattgtagccttttgtcttaatccggaagagcagtgatgagcacctgaaccaaggtcagtggcagtgggaaaggaaaggagtaaatataatatatttgtgagatggtgattgagagaagagtcaactgagcaaaaatagctgagatggagaacctagtaagtttggataagccataaagaataggagttatgttttgtcaattttgactttgaggtggctaagagatgtggctaagatgggcgtgtccaataaggagttgtctggagctcaggaaactatcttggttcaaaatagagatttggcatctatgaatgtagaagctacaggaccagattagtcctcctagtgcaggagtgaagagtgagaagaaaagaatggtgagaaaagaactttgggcagaaggaaaacgaacaaaaacaaaaaacaaatctatgaaggagacgagaaagagcaaggagattgggaagaagaacaattatccaggtatctcttctccagtattagtgagctgatgcttttttcccctgtgaggtagtaatgactatcaaataattttgaagccattcataaggaatccacaagagtatatacacactcgatagaatgtctttcttactaagaaccatgttgtcatattgggtatcttattgtacgttatattaaccatataagatatcctgggtcactgctatgtgttgtagaatagtaaaaatgctctcttgttttagagaattggcaagtgtttataaaatgaaagtttcagaatgcatttgtcaggggagaggaaaaaaaaacagtttcaagtattagtaacaaaattgaatgactaagaaatgaaataaaatatctgtgaggaataggaacaaaaatgcctgagagtatcaacttgcatttcacataggaggaagttctgaacaatttcatcagtatttttcttcctttaaaagcatcttatgtttagtctcatccttaggttttcattaagttgttttcttatctaaaatggtctctccttagtgaagatttttaaaaagagagagagagaaagatggccgccaagaagctggagaggaaagtagccctcactgaatttggtttagggcaaattctcctggaggcaatgtctgtgattggattatagccacctgaaaagacttgcagggatcttatagaaccttcgggggttgattatcattataagtcagtaagactgaagaaaaaaagtagcagacatcgagtattacgaataacttaggaggaaactaaggttttaaaaaagatcttcacccattaatttaagactctaattcttcacaaacatacatttctaaggcagaatctatacatgcctccatcccagtggcccaggaataaaaaaagaatgttttattcgtaggaataccaattagcttacgatgctgtggagaatgaaaaagtagactccttataccaataacaagagtttaagcctaattttattagggcatttttatggtgcaaataatttttattaactgcaaaaccagattcccttccaggatgtctgtatgttcaatacattctgagagcacaccctagtgagtatgctgtgttatactcaaatttatttcccaaaataccaccaaaacactaacatctgttgtgtttggttgttttggtttggttttgaggctctttctgtgaaataaagaaatccagtacttacataatcttcataatcgccgtgattttttttttttaaagaaatcagtgtgcatggaattgtttgtaatgattcaaactgatataatttggctacttactgatgagagattctaaaacctgagacacctggggtaatctttgatatgtatgtgatcagtcaggatcaaagaggcctgtggtctttttatgtgaactgtgggcaaattcacatctcctactgcataatggcagcaattatgtatttatttagcttctgggccaaggagacctctgagtacactggttgtgcacagatctggttaagatcacaacctctgaaagctgcttgcctcctgcacgtacgtctggctctgcctctctctggctgtgtgactcgggcaagtcacttagcctctctgtgactcatttttctcacctatgaaatggaaataagacccaaacctgtcttatggggagttcataggagaactacataatttgataattgtaaaacactgagaacagtggctgttatatattaagcactatataaatgcatggcaagaaataaattggtctgattagcttgattttcttaatctttcaggatattagccttttattaaaggaaatggatttggtgtcttgtttactaaaatcagaatgtacagcctgggcaacacagcaagaccttttctgtacaaaaaataaagaatcggctaggtgtagtggcacatgcttatagtcctaggtacttgggaggctgaggcgggacggtcgcttgagcccaggagttaaaggatgcagtgagctgtgatcatgccactgctgtccatcctagcaagaccataagactttctctcaaataatttttttttaaagagcaggatttataaaaccaataaacaaataagtagtccttgaaatgaaaagtctgtgaattgtctacttttctccccagtaatattaaaacaataaaatttctatgggaatacatgtctgccatggataaattggaaaattctgtgctgttttatcaactgtaaggattgcatgtccaaaaaattatgatagttggcaagatcaagtctccataaaaatggtaggtcggaggaaaaaagaagtggaatcaactgtttttaaaaatcacggcaaataagctttctagaaagtattaactttctgccttaaaaattgtccatgaaaggaaatacttctccagtgagcagcaaaataccgggaattctgtacccaaactggtgttaaaccctggctctccctcttgttagttctgtgagtctgggcaagatcctttactcctctgtgcctctgttttctcatctgtacaatggggatgataatagctgcactaactttgtggaactgttatgaagattaaatgagaaaatacttgttaaaaaaaaaaaagacagttctcgtagtatggtcattgcaatattctaagataaacaactcacctttctaggctgctctcttaatttgctgaagcagattcccccaagtgtcatgttactcagattatgtccttttcaagttttccagccagctgttactggtttgatatttaatgccttatcctttagcattccttttttttttggtaaatctcagttaagtgcctgtgtggagcttgaccttttcctaaattgttatcacagtgctggaggatatgcttcttggggtctggggttgtgttcatgtgctaagagcgcctctctgtgttccactcacaacctttcccacacgagcttgggtagcaaagagctatggtccttgccaccctcacttgtttaagggactgaaccaaacagtaaataggcaaaaatattaaaatatttaactctatttttgtttactagtatacatctctatcctttcgaatctcacattagcaaaagcatgactatcaatggatcattcccttaatatcccctgcgtctcccttaaatgcctttgtccaggattaacacatagttgacaatgttatgcagtccttgaggtgatatgtttatcatgacagaggctgagatgagcactaagcccagtacccctgctcaaagtaggttcctgtaaatggggcaggtggtgcatggtaaagggaatccccttgctggggactaggtgttggcagttgtacagaggagggctatgtctctgtattttaaaaacgtaatcagatttgcttttgttttctgttgaatttgtgcaatgaatttgcttctttgtgatgttattcattgttctcttttaagagaacacctacactcagtttcagaaagttgggggagagagggaggaagaatgggtcattttgaaggatgaactattttaaggcagtgggtgaagcttgtggggagccttccagagtgctgtgtgtctgtgctggcccagctgcaggaggactgtggtgtatgttcagggatactccacgatctgtgcctgaagtggaacataatgaaagccacatagaagaaaagcatgtagctggaggcatgaggaggcaggaaaccaaggaagggagtgcagtcatgtgtttctggaaggctggccatgtgagagccgtgaaggatgcagacatgacaaagccagcctctccactttccctaggtttctaatcaggcgtgggaatccaaatagaaggaggaaatgaaagacctatggaagcataaagaagtgggacagagctttagaagtgaagtgccattagcagaggtctgggctttggaggttgactcagtggggtccaagtagagggaaaaccaagagctaagcatgtggaaatgcaatcaggggtggtttgtttgacacagaggtataaattatggttgaatttagggtgcattcacagagaaaagcaagaagtagtggagtgggctcaagtttagatgagtgttgaatgccttgctaaggtatttgcatttttttctaacagctacaggtgatcactacaaggtaatgacttttgaaggggagtcagttacagagcaccaaagataagaaagaacctgttcaatgagcaatccttggcatttatccttaaattcacatttatccaatacagaattgcttatttttagcccattttgccagctccctagacgtggctaatgctctgagccccaggttaaggtgtaatctaaagtcacaccatggctctgcaagacagacacagttcttactgggtcttcagtgagggacatcccagctgctcattaatctgcctgtatcccaacataatccttgggtgcccatctcacatggttggacaggcaattacttatatccacagtaaatttgccatatgacagtctcttaatgcgccacttctctgaataattttcctcgtaaagaaagttttaacaagggtatgcagaaatcacttcttgcatatattttcctttgccctgccttgaactgtttaccacacaactagaattttccttttcatcttctgctcctccttcttgtattagggttatccagagaaacagaatcaatagaaaaaaatagatagatagatagatagatagatagatagatagatagatagaatatataatatatatatttggagagacagagaatccttataaatctcatgtatatatagaatatatatgatatatatgtatgtaagtatatatatatgagatttatcattaggaataatctcatgtagttatgaaggctgagaagttctacaaactgccatctgaaagctggagacccagaagagctggtggtgtaattcagtccaagtccaaggacttgagaaccaggggaactgatcatgtaactcccagtccacaggcaggggaaaatgagacgagatgtcccagctcaagcagtgaggcaagaaaaagggctaagttcctctttcctccacctttttgttctattcagaccctcaagggttgggcgttacccacacaccttgggaagagctatctacttcattgagtccacttattcagatgttaatctcaactgggaataccctcacaaacacactcagaaataatgtttaatctgggcacccattggcccagtcaggttgatgcatagaattagctacatctccctatgcctcatcaataccactcccagaagataagtaaaatctatttagcaagataagtgtttcatactcagttttgcattgctaattcacatcacaaacttgatactcctctccaaaaaattttttcattgttgttgttttttattgttattttttctctttgggccaagaacagcatttcctagacctaaaagcagctccagtaaatgattattttgccaacggatgaagggtaaatgatccagcttctgtttctgtgcacatcttgattgttttcaactggaggacaaaggaaaagagcaaacacagagcctattggcaagaccatttttcaattataagcaaattcccaggggttacttagcatgcacttaccagaaatcttaatttgctggaatttctgcatattttgcctttcagttcaacatctcacaagatgaccttgggaatgctgctctataactttctaggagatcagggtacctttctaacgcgaagctaagtaaataagatttcaccacaagttaaaccttaaatcaaggacttttttgaaaaaaaaatcatatttgtattctgtgtaacattttatgactaatatttatgaagtgcttaccaaatgtcaggtgctggactaagcattttatgggaatctttccactatatcttcagtcaattctacaagatatgagtttttgttattcccatcatagtagaagagtctcagggacatgaacagacttggttgggatcacacagttaagtggcagagggagaattctagctgcagtcctaactctagaatgacactcctatccactttgtgctaaggtatttacctggttcatcactcatccataatacgctgaaatatcagttcactggattccagaataacaagaatcctcagatcacctgaattttaatttcattaaacagagaccaaaataaaagtaagaaaagagatggaaagttgtcactttatcacactcctattttaacccctttaatggcttcccattgaagttcacctccctaatgcagtctacaaagcgttgtgcgaactgatgcctgccagtttcttcagccttgccttttaccaatctgtccttgctcatgagctcaaggtcacacagataataagtggcagtgccaggatccaaactcagacagactggctccagggccatgctcgtgaccgtcttgctagttagatggatggatggaccgaccgacagatggaataatgtgcacatgaatggatggacagaaggaaggagaaaaggagggaaggagggagaaaggaagcacccataaatggatgaaggaagggagggaaggaaaaagagagggagatgatttgaaagaaacgtgcaacacttcttagagttcatacacaactagtcaagtctattacagtttttgcattgacatctgcagtacccttcaataagactgggatctccattcacgaaagaaaatgcattcataggccggtggctcatgcctgtaatcccagaactttgagaggctgaggtgggcagatcacttgaggtcaggagttcaagaccagcctggccaacatggtgaaaccctgtctctactaaaaaaaatacaaaaattagccaggcttggtggcacgcacatgtaatcccagcacttgaatccaggatgcgggggttgcagtgagccgagatagtgccactgtactccagcctgggtgacagagcaagactccatctcaaaaaaaacaaaatgcatgcatatactcgtttatccatccaacagatgaaattaaactaaagtttaggtatggagaggtaccccctgcccaacttcagaagctgatagcagttaggtgattggtccaggatgcctgcataaaccagttatgtagtttttttacccagccagtaaacttagttacataaaatgtcaatccctatttctagaggtgatgggcaggatatacacactcattctgaaaagcccactgaaatcatatgtatgaaatgttatagttttatcttgtctactggatagacaggatatctgctcctggaaagctcatattctacctttttaagttaacttttcataaaaagtgtaacttacatagaggtgttcaaatccaaagaacacacacaactcaatgaatttccaaaccgccaactgcccatgtaactgctatctagattaagaaaagatattaaacaaccctcagaggccccctcttgggccatcttcccactctcagtttcttctctcttccaaaagaaccaataccctgtttgcattatcatctgtgaattttgcctgttttgagctttaaataaataggatcatatcctatggtctcttttatgtggggctgtttttgctccacattatatttgtttcagttcattcatgctattgtgaaagttatttgaatacactcatattgtatgtagcatttttaaaaataatttctttgtagtaagtatgctgctgtatgaataaaccataatttatttatccaatctgctggatggacatttagattgtttcaagtttttggctgtaacaaatagtgctgctgtgaacattcatatacatttctcttggaatgcgtatgtatgcatttctgttgggtttatatctttggctagaattgctgtattataaagtaagaatattttagctttagtaaatactgctaaactgttttacaaagtggttgaacaattttacactcccatcaacagtggatgatgattccatttgttccacattcttatcaacacttcatgttttccatcttttattttagcccttctggtggatgtttaaaagtagctcattgttgtttaaagctgcatatttttttctgtgacttaaaaagcttagctccttttcatgtgttcattggccacttatatgtcctattttgtgaagtgcctatttacgttttgcccattcttctactgggttgtctgtctttttcttagtgacttataggagtggttatatatcatagataccagttctttattagataatgttgaagttttttctctattccaaagttgccatttttattgtatattttgacaaacaagttcttgagtttaatataatagaatcaaacagttttcttatgattaatgatatttctgttttgtttaagaaactttcgcccaccttaaagtcatgaatatattcttacatgaaaacaactttattgtttttccttttgcactgagatctataatccacgcagaactgatctttgcagatggtatgaggtagggagtcataattcatttcttccagatgcatatacaactggcccaattcaaccaattgaaattcctttccactgcagtgtcatttttgtcataaatccagtgactgtatatatgggtctctggactccctattctgttctattgttctgtttttccatccatacaccaataccacactgtcttcattgctgtcattttacaagtctttatatttggtcccaaaagttttccaaatttggcattttagctaggtacaataataattactttgttattaaaactagtaacgactgacatgtattgagttctttatctcggttaacatatgaatcactctacatttaatcttaacagcaatctgataagatagaaaccattggtttttctttttttcttttcttttctttttttttaatggggatatagaggcctggaggaattttaaggtgatcaaggtcacattgctattaaatagtgacgtcaacatttgcatgcaggccaacctgactgcagaagctctgctcttttattaactgtgtgcctgggatgtggcctctgattacttttgctgaattggctgtcttttggtgctatgaggctgattttcagccttaacactagtcggtattttttttcctctctccatgtcctcaaaaaaggcccaagggaaggtgaacaatgaagcattgaataaatttcatgctatttttcagtataaattttatactatttttaggatacaaaagactatccagagttctattaaaccagacttcaggagctgagaagagctgcgaaggtttaaagcctctgatcccctgtcctgaaatagcaggggtggtagcttctatctaggctgaactcataggcagtgaaggaacttcaagttcttgaccccactctcctcttttcacctctcccacctacaaaaggttctgaacttttagcatctccccacgcagtaccaccttccaaaatcaaactgttaaggaataccaggtttaaaaatagaaaactcaaagttttctaagtacggtaagattatttttatacaaaggaataaatatacatctgcatcagagaattcataaatatattatccagactgaccctagaaccacaaatagttctaatgtaagtttctgtgctgtggatcaccaggcagattttaatgactgctctaacaggttttctgtgttaaatgcctttgtgtgtgtatgatatattccatttttcctgtaattcataattttacaacaaaacatccattgtgttaggccagtgcgtgtgtttttcaaagtgcaccatttccaaaggcagttgcaatagctcatgaagtcatggtaaaaaatattcatatttgcccagtgctcccaaatctctgttatttgtaaatgggttcagagtctctcttagcatcaccaaggtcatagaaaggatggaacagagcttttcagcatctcaaaatgtgtatttgtctttagaaaattcctgtgagagcgaaaatggtatgcattttcccgtcgtcttatcattctatcattagtcaagtaatttccttatgaaatggtctgcattaggtaggattaacaagttgagaaagtgtaaaaacaattggcgattttcttacgaaagaaagaataaatccttgctcatcaaacatttgctaaacctatcaaataccactctaatgtcttcacactctaaattaaatgtgtagtcatcctgtcaataaaggaaatagtagtttgggaactaaagttcagtgcaggcagactctctaagttctacaattttggatgggctttggggagttgaagatgtattatctggcatctatgtatatggagactgctggaattttggacttggcaggggtcttacaaatccattagcccaactcatttgcaggtaggaaatctggagcccagggagctgcaatgacctttgtaaggttatggtcagctctagacccattccctacgctcatttttcattgcttgtttgctacagtgcagtaacccttgttttctgagagccagtgacaatacctgccccactacacattacccagtgaaaaataggaacatatctactttgacaggcaaagtggtacataagtgtacagcattttatttttatttttaaaaatatgtatgttcaggttatagctgctttcaaagctggcttgcttataagtgaatgagatatcagcaaattgtaccctcagtcctgaaaatatcttaatattccagacttaaaaaaccattgtgttgggtttttaaaataaagtaaaatctcattgtgttaaaaatagtgtgattaaaacaatttcgtttttaaacgtcttactatttttgtcccattgaaagtgtctctctaaatttcatttataaaatattgtctgctaattcttttttctcagtaagtattgttttcctttaaaaacaataataaacctcacccttcctggttttctttgtttatttaaacctaagaactctattcttagacttaggctatctctgcaaggtgacaagctctcgtgtataaacgtgtagcctgggagaggctccacttgataaatggtgaacatggccaccgtgttggcccacacttggattgagcttgctgtcttagtcactgttcccatttgatcctcacagcgaaatgatgaagtttgtatccaaatacacaaaagccttttcactgtttcttttgttacctgtcaagaaccaagttattcttactttgttatttgcctgtatctccctgcaaaggaggagtcttcaagaatcttagaatgatggcaggccaaccccttcatgtggaggtcagaaacaccagtgctggagatacaatgctgggtttgatttctggcactgttgctgctagttactcatcttcacagttcctcaattttctcatctgtgaaacagggatgataataataggacctttgtcgttgttacacattcagagagttcagacaggaaaagctcttagaatattaccctacacagttacctcctcatgtgaaatttcagctttgaagtctgaatagttcagtaggtttttgacatatcatcaagaatgattggttgactctaagcacccccgccccccgcttatctatgggaccctaaaggccattcaccagattcctctttccttcctcatctcctagaattgttggagtctttaagaggctatataatgtgctgagaatgatgattaaaaatagtaactaatagccaccgtttactaagcctatgccatgtacttgattacaaatagtaactagctgtgcctgatggcttatgcctgtaatcgcagcactttgcgagatcaaggcgggcagatcacctgcggtcaggagtttgagaccagcctggccaacatggcaaaaccccatctctactaaaaacacaaaaattagccaggcgtggtgtcgtgcacctgtagtcccagctatttgggaggctgaggcaggagaatcgctggaacccaggaggaagaggttgcagtgagccacgattgcacctttgcaccccagcctgggcgacaaaacaagacttcataaaaaaaaaatagtaactaatagctaccatttactaagcctatgccatgtgcttgattaaaaatagtaagtaggccaggcacagtgtttcacacctgtaatcccagcactttgggagggtgaggcgggcagatcacctgaggtcaggagttcaagaccagcctgaccagcatggagaaaccctgtctctactaaaaatacacaattagccaggtgtggtggcacaggcctataatcccagctacttgggaggctgaggcaggagaatctcttgaacccaggaggcggaggttgtggtgagctgagatcacgccattgctctccagcctgggcaacaggagcaaaactctgtctcaaaaaaaaaaaaaaaatagtaactaatagccactgtttactaattctatgccatgtgctaggcactttactgcacactttatatacataatctaacttgatgcttacggactttatgtagttatatatttcacagatgaggaaacaggttcaggggggtttatttgtctaaagttctatggcacgctagggggcatcacatttaattattcgaatgcaagtctgtctcactctctatcctgcctcctcattcctgtgttttctctgacctccagtgatcttgagcacatgttttcttatgctattgtcaatgtgcttgcttgggttttttttaatatattagtaatttcacatggcttaaacaaattacataccaacaaattgtgtacaaagaattacattcaaaagaattccaattccatttgctgtggtgtctccacagtgtcatcaggagctcctactaactgtctagggtatagccctcatttttatgctgacaaaatggctgcaggagctccagtcatcagtcctgtgttccagacatgaagaagttgaagtggggaggcagagacaaaaggccacaagtcaaccaagtctttccccttttaaaggtctttcctgggaacagtgcccagcagttttcacttatctattatttgggattgggtcatatgacgactcttaatcacaagggaggcgcaaattgtacttttttagctgggcacattgttgtcatgaacaaaactcaggttctattaacatgaaacccagctggtgagctttttgaaataaatcaaatacactcattcaatgtgacctttccctagtgcctgagtacctggggaaaccttgatacgttagagaagctgagaaagataaaatatcttgaggaagaaaaaagggttggttcagcagaagctaggaaccaggtagatgatttcttggctgctcagcaaggttgagagtgcagctttgcccagacccaggaaaggaggagtaaggtccagaaggggagcgtaaccctggtattccagtctaactccatgtaagccacaagtagtaggaggaaagcagaggaatcttacacagtaaatatacatcagcattaataggtgaagctgtgcctcttgtaaggttttacttcataaatattttctgtggatagaaaaacaattgtttcagatttgtgttggtggaggtgcattggaggcagggttaattgagaaacagaatgaggaaagcaagtgaagcagaataatgatgcgctttggagccaactcgaccttgaattctagcaccaccacttgcaaaccatgtgaccttggagaagtcaccgagcctttctcaatctcctatttataatcttaaaaagaagttagtaatatcttccttttgtgcctgacataataagtgactatgaagtccatcattcagtgcccggtgcgtggctgctggcggtgcaggccttggtactgctatctcatggccgagtgttctcagtcagcaggcactggctacgcacttgctgtgatccacattggactgcaggtcatgatctgggtttatgttgaaggaggagtacgggagacctaagagaatgggtggaggaattaattttcaaagcagcaaccacagagaaatgcaatgagctcttgatgtcaactaaaggaggaagcctgctgctgggtcagctgactgtgggtttcagacgctcatttggggccaactaaaaaaagctcatgatggaaggtgttatttatccaagttttacctttctcatatataaaatgaggatgtccataaggcctaccttccagggttgttacaagaatagtgcttgtagagctgttggcatgccatatgtacccaacgaattatctagttaattattaatgatgtcacttccctctttacccaagcaagagtaggacttgcaagtctcagctttttctggctttcttagctccactcatcacataaaaactttagggcataaagtacacaaataatcacactagatccaaaaatgatactgtgataatgtgattaataacaaattcttagatggcaatagtgttttaaggtacagctgaagatttgtaaatttcattggctttggtgcttataaaagggagaccaaccgctcattgcccagggcagcaaaccacacagtctgccagtgttgatcttctgagtttcttaaatagctttgtatcgcaagtcaaaacttcacatttgccatctctctgctagtaacacaggctggggtgggatcacttatatgtttttgcttctaactgttgaaatgtgaacaggctggactaggaattagtgtggaaaaatcacagaaaaactcacattcctggaaacagtaggcaggtgcaatatttattgtcatcaccaccacttccctccatatcggtgttaacttgtatcctgtccaaagcactttgccctcagttggcttatttgatctgctttgaagccaagggagaaggcagaggggacttcatttcctattttttctttttttctgttttttgggagacggagtttcgctcttgtcgcccaggctggagtgcggtggtgtgatctcggttcactgcaacctccagctcctggattcaagcgattctcctgtctcagcctccagagtagctgggactacagcggcatgccaccatgcccagctaatttttgtgtttttagtagagacaggatttcagcatgttggccaggctggtctttcaaacttctgacctcagatgatccacccgcctcggcctcccaaagtgctgggattacaagtgtgagccactgtgcccagccctccatttttttagttaagaaaattgaagctcagaaaggtaaaatgacttgctctggattggcctgggctgcacttgaacccaaatcttctgtccccccaccccacccccggactcttcctacaggactgtgcattgctccaggcccatgcccttactttatctggaggaaaacagcattaccatatcttcaaatcgggttgtgccctttagaaatggtgagctgtgcaaataaacaccactttgctgttgttttaaactgttaagaagtctgaaattcactgtattcatgaaggttgaggagagaagaggttggtgtgtaatagcttggtagccgtgtatccttgagtgtgtttccatgaggcttgatcagggtttgttcactgggggcctgctctataggattctaagtagattcgctgctcatccacatggcaggcaccagggctctccccgagaacagaagctctctgctataagcctgctcccacccctccctccatcctgtcctggacttccagggcctgaaacccttccattctgagccttgaggatgaattgaccttaaaagagattccaacagcaaatgaaacaccttgtgttctcactcagaagtgggagttaaacaatgagaacacagggacacagggaggggaacaacacacaccggggccagttggggagtggggggactgggggatagagagcattaggacaaatagctaatgcatgtggggcttaaaacgtaggtgatgggttgatgtgctgctgtttaaaagcctgaaagtcatccagctctcatgcaaaccaccatgttacatatatacctatgtaacaaacctgcacgttctgcacttgtatcccagaaattaaagtgatattttttttaaaaaaagagattccaaataaaatagaaagactttcactgtatgtaacagcatatatatttattttttaaaaaccttagggtattggttctgggggtcacaaaccttagttccttgggctccacagtatcctcatccataagatacgagtggtaagaggaactgtaaagatcaaatgaggtataacttacaaaagggctataaaaatgtaagcttgacagatgggatgatgggaggggctgaggaggaggaggaggaggaggagagtagggaccagacctaaagttccgagcactaggtgtgacccaaggaagctctacaatgggggcttgaaggcagttttggctgattttatgattttgcccaggactggaccagttgccgccttcaaagctattcaggttgctttgacttccagccatctgtgcctggaaatgtaaaacaaatggttaatggcatcagatggttaatgatctcaaatgttccctgcttactgccatgagagagaaaagagcctcctggagaaataatcatggatgctgtttccaaagttgcaattaatcgtgtattcaggaaaacccatcttctgccagttattctgataagaaagaggaaattgagggtgacggaggagctgtgcctgagagggcagtttgaataatctgtataaggtcaagaaggcagatatagggctcataatcaacacagcagttttggaacaaagccaagagggtcttgtcctggcatgggttagggactgacttttatgagtccaaaaatatgtgtctaaggctaggtctgactatctggccttaaacttccgagttgtatgggggccatcctttggttgcttttttcaaaaatactttttcaccattattgcctgaaccaaagatacctccgcttgtctccctttggggcacatacctgtggttatgttctcgtgtttcactgttttaaaactttttctcttattttccatctctttcctccagctagtgagacctgcaacgacttccacccgatgttcttcacccacgacagatcctttgaggagtttttctgcatctgtatccagctcctgaacaagacatggaaggaaatgagggcaacttctgaagacttcaacaaggtaatgtggatctcggatagaggcaggggattcccgcagcgctaaaggggcctgctgcatggtcccttggctgtgtgcagaaggcaattggcaaggtggggaaatgaggaagattgcaatgatagttgcttcaagaatggagaaagacaaacatccctgtgtagacatgaatctgtgtgctggggatgacctcatccctctgggggtacgcttggagcagctttgttcctttgtctaagttggagccaccagcagagagtttttcttgggacacgttatcaaggcgaatgttttctttcatagcattagtttgggatgccttgtcaatattgcaagatctgtcggggaaggggccttccctccacctgtccaggagattggtacagagcaaatgagatcaggaatactgctccacctagtccggtggtttctttgtggattatggatgtgttgtgatcatctgccccgagctacgtcaagaagaatttttattaaaatgaaagatccctttccaagaactgagtcattaaggttatatgcaacatttcttggtttacagtaagcatttgatcctttgaactgagatgtcctttagttttctatatcataatgtctcacaagagtgtgactttcacatttccatttgtgtgtgaataaccagcagagggaagagcattggccaacttagagcagaagcactatccatgctttcatagagaagcaaaatctttgtccttagataaaggcctgattagcaataataactattgcagcctttagtacttttaatttgctgctatatacagctgtgactgtggtcaggcccatcacccatgaccactctcacccagcactaagggctgtgactgtaagagtcgaagggtctggccctcagtcatactgtggggctttcatgggcgtgcttggtgcataacataatctctgaatttcacctgcacttaatatacttgttggtcattgcctccctgtcaccttctccctggatatacatctcatccttgtttcccactatatttctcatttgtggcatcttgaaccaacaccaattgaaaagaaagaaaatcaggaaaaggacctaagcttcagtcaggtcctaacctgagtttcttcctcagcacagtgatctcacttgccatatcatctctgtcatcccaacgatctgtcctttgcatcttggtcatcgattgaattccttgaaatagaccccagtaatgcccttctgtggagagcactggtctggaagctgcaatccagagctgtcatgtgtctgagcagctatgccggaggacaggcttgattcaagaagggaagtggagaaaagaagcccattaatttccttaggattataactgcagcctcctaagtgtacttcgcttgattgtgagagactttgcatttcaggtgcaaatcatccctgggaaagagggaaggaggagcagggaggcctttgttcaatcaaaccaaaaaagagaattaaatcagtagtctttgaaattggctaagggactaaggccactttgccctggatcatttcagctctttcatgtgctgctgtgtgaaagccatccagtcctcagctttgcgagctggggacacctgttcctccaggagaaggagacctcaccagttgttacggatttgggcatcagatgtctgctttctgagagatctcatttatcctgcttttcctaaattataaattctgcattttgcagaataatatctgcaaataataatgtttcagatattattgttgttgatctaggcacagataagctgtgtagaaaatattatgaaagttctgcagaggactgactctggggatgagcattcagacacttaaatcctatagaagttacattttgtaacatgaagcaccaagagttccttgttagcaaaggaagccggaggccccaggatggaggaggtgggcacagctggtggagggaggtgaccatagctctagggtccctgtggcttatcatggccatgtgctcagattggtggcagacatcctgcctgttcagggccctgccaggtgacagcaagccccccagagtgtcactgtgaaacttttatcataattagcctatatggctgtgaaatctcttcagcaagacctaagagccaggttttgggtgcagtttcttaccgtagctctaatgccattttttgcattgtttacagatcatagactaatgctgggggtcacacctctattgccaagtagggatgacagtttatggctcaggacaggcagctccaggcctgagggccagaggttcctgcctcacatccaaatagccatcaggcaagagcagatatcagaggaaaatccaggatgggaaggacaaggaattttaattttctacattaaatactttcatcgtgtttgctttttttctctttttttcagtactatgcatgccttacttatgtaaccagaaaaatatatcaggtatttacatttttgtcatgcgtatataacttttctgttgctgatacaacaaattaccacaaatttagtagcttagacaatgcaaatttatcttacagttcatagttcagaagccagcaatggatttcactaggacaaaatcaaggcggcagcagagctgtgtttctttccagaggctctaggagagaatttgtttccttgcctttttcactttctggtggtcacctgcattccttggcttatgtccttcttgtccatcttcaaagccagcaaagacagcttgagtccttctcagatgccatcccatcaccctgatccctcttctgccttggtcttccacctttaaggaccttgtgattacattgggtgacctggataatccagcatcatcttcccatcttaaagttggctgataataaccttaattctgtctgcaaccccaattcccctgtgctgcagaaggtaacgtattctcaggttctgaggattggaatgcaggcaccaatgggaagctgttattctgcctatttccagtgtgtatttgatttgcagctatattaggtttttagatgtgtagatcagtttaaattaatgaaacacggacagaggagccttttgtttgcttttctttttgctggtagacatgatacctgtcacagagttctgctagtgacagctcagatgcagatataattatgtcccttttcttttatggccctgttccgcctccactagcctttttaaaaaggaagcctctttgtgacagcttctggttcattttgaagactgcctttctgatttttttctgctgcccatctatcagccactgttctgctttacttgataataagttggagaagagagaagagctgaaagttaaatcagttcacttttcttcttgttattaacttggtagcagaggagattgaatttaggaacaaatgtgagttgtgagttactgatagatttaatgtttttttcttattctctgactgtccaaattcaaattcagaaatgtctttaaaaaagcccaacatgaaacataatttcttttcaactttcttggacactatctcaggttcttgccactgtaaacagagcatggaaggtgggtttatttgtcaaccctgagacccagggctctgtgagcagggcttagctatctgtcttctttagctcctcactggagaaggagtgcccctcaatttaaaattttgatttgcccaacaaactatgctggattctatcagaggcaggaatagcttctgcagcccgccttccttgggacaccagtttatagatatctagtgcttggtagttaatgccactgctggaagagggtgtttggaaaagcagctgtcgtctgctcttccgggcttgggaagcagcagatggaatgttttttatttatataagagaagtagaattgaagagtgattaaaatatttatgctttgaaaagtactttctttcagtttctcaatatagcactctgcagaataatccattgattcaggccattgagtgtgtgttctatcattaccaatattttagagcatgcattattcatttttatgggcattagagaagagctaaactgcagctggatacctcagcacacaagtagccccataatcatttcattgaaatcctcatttttgagcgggataagaaaggggacacaagtaacttggatattttaggtatgggaatctcatttaaagcatgtgtggctaactactccactgtaaaaaaaaaatgtaatgagagtatacactttagagtatatgtctgtgtgtagcagtgtttctcagctttagctgtacgtcagaatcacctgggggcttttgaaaaccctgttatcccaccggccaaccgcaccacagattaattaaatcatcgggggtggcgggggaagctatgaatgagtattttcattaaggtagatttgatcattaaaggtgatttatgttaatagaatcgccatcattaacacatgtgatacttatcacaagctactgtaaatttcgtgcattgatggagtaggatgcttgttgacctgtgtgacccaggttttcatcctggatctgctattccagagctctatgtctgagaatctaaaaataataatagtttttaaaaggatacatcaccctgtcttttggtggggtgataataaattgaagtaattactgtaaaaatgctctgaggaagtaaaaatggtatatgtagttgtggagtgttcttttgtactgaataagataaagcctgtctatgaaaaatgagtaaattgcccttttcacaaacagacattttttggctatgttaaaaaaaaaaagtgaagctatgaatttcacagtaaattctgaactgaattagtaacccatgtaactttgacaaaaataggctttaagctgaaattttcatggattttggaagtgtcttcctccaaacaactttattaggtaccttagtttcccgtgtgaaacacacggtagcaacctaaaaaacagcaggtcccatgattttcacatatttaatggctggtgagaattaagtcctccccaacaattactagttgcccagatctcttcgctgatgattgacgcttttataaaccatcaaaatatttgttcctagcattggcgttactttagacgctatcaaaattgacattataagccaagatcagatgattgtgccatactttcagattaccaaaatggaagaaactaatttgaaaaatgaagtcactctagagtaaaagcactatcttgaaactttatctagcagcataataaactaagcgcacacaatagagcttagaatctcaggcttgcaaatgaaaaaccatcccttaaaatagcagagactgtgcacagggagaacccaggcccattaaacaaagctgcagctgcccctggccaggctgtgagcttcaaccgagtcaatgggagaaaatctcaattaggaagaacgggagagcaggacagaaggaaacatcctgagaaatctcctatgaagattattcataggaaataaccaccagctagtcacatctagtggattatagtgtgggatagaaaagggattgtgtttaaaaccttaaaggcagctaacacatgaataaaaaagggaaatgtgtttgcttctcaaactgtttgcagcttactgactttctgtgcatgcttttcaggggacaattatatattcaggagtctccttactagggcagttcaacttcatagtggtgcagacggcgctctgttggttagctgagctggcctagggaatgaaaggtggtctgtaagtctcatcatgaataaacatgagtctcctcatttgcgtgaggcaggtgactgtaaaatatcttggagcaagctgtgaaaggaagctttgtgcatccatgcccaggggaagctgggaggactcagcgttgtttatcttcattagaattccatctagtgctgctgttattgatctgaactgggcctggtgtggctaataaagtaggtgtatgttttaattgaaacatgaatatttgagtagaggagaagtcttttaaagagccctaatgtcctacactgagcttttccatttttcaactgtctaggcgattaacaagcattttttttcaaaaggcttctgatgtttcacaaaggtcttaggtttgccacacaggcagtggaacctcctctagaagcaaatgcattatatgaatagatttaattattatttctttgatattccctgttgaataggtagcaaagagtttcatatgtgtgtctgtgtttaagctgttcatgtaagatagtgttacctatttccatggagtttgccgctttctgttggacagcaatcaagatatgtcctctccaatccttaccagtgtcaattatactatccagagacagcagaaagaccgggaaagtgactttggtaacttatctttttcaataagtgtatgttcaaatagaccccaatgtcatacataaacagatatgtgttaataacaggtaacataaccctggccaagtcagggaagcactgtggtacagagcaatatttctccttctcttttgcattatcaccccgctagagagttttataggtatttttccccaatcaccctccccctgaaattgtaattacagatatattgtatatgtctttgtgtatgtatacctgtgcctgctgtgtaaaaagagtaatatttactcctccaagaaccatttttgtgccctccctaaggatgatgtccccactccctcatcaagaatgcatggtgcaaaggcaagaaccaaggctgaattagcaggaggatctggtggcagtcccagttggcccctcacagcagtgtgaccttgagcttgttctttaaccaccaagtcctttctcacctgtaaaccggtagtggcaatagtaataaataatacttcccagagtcactgtggggattaagctctcattaggtttgctttgcaaattgtcctatacaaataggaggtcctaatctcaacaggcaaaacctaaagtgtcagtaatttgcactttatcatgcagtgtaattgagctgccttgatttccccagatagtttgttcaaatatccataaatacagattgttttatacctctgtatgggggtgcgttgaactttagtttggccacagaggggattttgaccactgtggtcactcctccccagcccacccacaaacagatgtactgcaggtgaggcagggggctggggacagtacataaaaatgccaagggcctcccttccagctgggtaaccttgtgcaagggacttggttctgctggcttcagattcctcatctgtgagatgggaataggtaattacccacagctaggatggctgtgcgccctgatgacatcaggcagataaactggcaggctcagcactggcctggagccaacaccagtccacagtaatggagagcagggagaagaccaggtgacacgggattccaaatgcctctgaaaaggaaaaggatgctcatggcaacactgagagcaaacatcttcaggaaaggtggacaagctgctccctcaagtttagtgattaacttagtagtgactcttttttttttttttttttttttttttgagacagagtctcgctcttgtcacccaggctggagtgccatggcacagtctcggctcactgcaacctctgcatcctgaattcaagtgattctcctgcctcagcctcccaaatagctgagattacaggcgcccgccacgaggcctggttaatttttgtaattttagtacagatggggtttcaccatgttggccaggctggtcttgaactcctgacctcaggtgattcacctgccttggcctcccgaagtgctgggattacagttgtgagccaccatgcccagccagtagtggcttaacttctaagtgtgctgccgtggtggtctcagctgcatggggtccatggcagcttttatgaagaacatagagaagaccttagagggtgaccaattttcagggactgtcctggggttgtgcactgtaccctgcatctcccaaccctctacccgctgaatttacagccctggcagcatctctttataaggaaggagcatgcgaggaatctgagtcatccagaaagagttggattttgttgaccctgttcatgtaattttctttttttctttttttttttttttttttttttttgagacagagccttgctctgttgccaggctggagtgcggtggcgtgatctcggctcaccgcaacctccaactcgctggttcaagcgattctcctgccttggtctcctgagtagctgggattacaggcacgcaccaccatgcccagctaatttttgtatttttagtagagacgaggtttcaccttgttggccagaatggtctcgctatcctgacctcatgatccacccgtctcagcctcccaaagtgctgggattataggcatgagccaccgcgcccggcccatgtaattttcataaaaatggttaaactatttaaaaacctgtttaaaggttgactgctatctttagctgaaggcatttttaatatgttttgctttctggacattttctataacaggagcatttataaaaatggtcttgaccaagagtgaatcttaccattttgaataagcctgacagtagtaaatatacttcttgggtattcctttgtgttcaagattttgcatgaggtgcttctcatttctgaagtctttctagagccagtgtctatgtttctttgcatgtgtagcacgtgctaacttgagatttgccaattaggaggagaaaataattgatttgttcttctgctggacagcagtgagatatatcagtcccttggttcaatttctgaccatccctgagcatgagaataatgatgactttaggttaactgctttccataactctgttcagtaacttctgaaacttctttcattttattaactatacattggggctgtgtagaaaccagttgttaactggtttctatgacctgaattccagattccgttgtggattatatgaaaggtttgataatgtcacagaaaccattttattagtatatgtcccattaaaaggaaattacctacattttaagtaaggcatgatgagatttaggcattttaaattaaagggcagataggaaccagagttggatagctaagaagggtaccattaggtgggaatctctcatgaaatacaaggcctcattgatttaaaaaaaatatttatcttgtaattgcaaagtaaatgatgttacatgggaggttaagaacacatttccaaaaagagatgagtctcctaaggcagaacagaagagcacataggtgctgtcatataggtgccccctattgccaactgagggtaccagatgttgtgatgaatggagggttgagggcaacaaggggccctagacaagataaaccaagcagtcagagtgagagagtgggatcagaagctatttgcaaagacgccaaaacaagagctagaagaagttaggagatcctaagtgagatttccaaatgttttctgcggaataccagatccaggtgcttggtagttaaaatatatatttaatgactaaatcataaaacatgcatattcaacttcatatgcatattcaacctctaatttacattggttgtatgtctgcaaatttttcagaactgtgctcttttatctgagcaacagtgacttatgggtcaagattatctgccttcatttttccaagtaggagctgaacactgatcttccttgttcaacccacacactgaccctcctgctctgtcaccagcatagagccaagtcattaagtcagacaggtccgaagcaaggacagaggttgagaggccagaagaagatatcaaagtaaggctacatttggcagtggttccctccttcttttctcttttcttttcttttctttcttgtatttgagacgttgtctcattatgttgcccatgctcatctcaaactcctggcctcacacaatcctcccaccccagcctcccgagtacccgggattaaaggtgtgagctaccactcccagcattccagcccctttttggcaattattacagggagaaaaatgaacattagaacttgaatttgagagatgataattccaaaccgaatttcttcttctgcccgcctccttcttccctttattttctggtttctatgtgttttcttcctattctagtaaagttaaaataatagatgatcaggccaactgtgtaggaggaagtcatttaggcaggtaatcagctcagatatcaatcggaccaccaccttcctcaggaaagtgctcaagcctgcagctatcacttttggcaacaactcactcagatgcccctgagttgtccctcttgctttgtccctaggaatacctataccctagaacttatgtcagtgaactgcaattgcctatctggcttcctaagagcagagccttgctctttctgtattctaagtatctagcaccatgcctaggatctagaaggtactcaaagttactatctcaccaccatcatacatacagcacagccacatcagcattccacatcttggttaatagggtcaatatccaacttactcttcaaatgctattcattctttcaacagatatttatttgtgtctacaacacagtgcttgtggtagacactgggagtacagaggtgagcaagacaggatggttcctgctgtcatagagctggcagtctagtaagtttctacttagaaatttatgggctagtccctctttgtgaaactgattagtggccaaagtcggtacaatcaccacatggtcctttaccttttcatcattgcctcagtttctgtcttcctcttctctcaccccaatgtgatagattgaatggctggtcacagttctgcactgcttcgtggtagtagcatacttccaaatccttgccatgacctcatgatgggtgaagtgaatttccttcaccctttgacttttgtcttggccaagtgaacttgcttgggccagttgagatgtgcatggatgtgaaacgagcagaagcttgactgttgctcaagtgattgagctgggcttttgcacttttaccatcatcatgagaactacataccttggtagccactgctccttcagtgtaggtcccaaaatgagatatatggagcgcagtttttccagtcagcccacagagcttgaaagagccacctcagctgacctgtagatctgtgaatgtgagaataacttcttacctgttggagttgtttgttacacagcattaacatgacaatagctgactaagacagcaactgttacaccaacttatctcccagcttggaaacctttccattttccgaatctcctccaacacagatctgaccatatcattcttgcttttaaaacttctgtggctgttcattgcctgactcattaaattttgtggcctcagcaagatgttcagatttatctttaattcacctaaagtaatttttctgctttatctccatatcttcaccctgcacctaccctaggctctacctgaactgctcttgtacgtgcaattgcattttcatgtctcattccctctaccagaaacgtcttcccccatttacctgttgaaatttcacttatcctttaggattttgcacaagtgccaccttagcaagatagttaccatctcccttttatttattcagaatgaaattttgtatgtctactcccacagcatggaattcaaaattttttggaaaatatcttctagttctatagcagttgtttatttttaagtctgtcttcccaaataaatcatatatttcaatatatcattggaagcaagagctagattttatgtcttaatatcctccaggtgcttttaagtagtatctgctcaaatactttgtgttgagtgttgaattaattaatggccagaaatgtttaattcaatgatcattaaaaatggtccacctgaccagtaagctgaattcatatacaccgtcttaatatggggtggccaccgttgttcaattcctgaaggccatgggtattttgaaattccacacaataaagaattttcttgccccaaatgccaacaggccttattgagaaacacttctagacccctccatcagaatctcttcagatgctaatactctgaggaagttatgaaatgattttgccatctgtttcttaataaaaatggcagttgtcattatttttctgcctatgtagctttatataaggtgaatagaaagcttcaaagacattgaacttttgcaaaagaaactgaattgttctttttccaagaagattggttggaactccttgttaaaaaacgtgtgtgtgtgtgtgtgtgtgtgtgtatacacatatacatatatatatgtatatatccctctgtttcattttcaccttcactcatttattatattgcccttaagcctgcttaacccacataccctggccattccaggagcactgtttttcccactagccttgtttccaggccagtgggaaaaataacatcagtaatggcgcttgttctttcccaggatggctgccgagagaccttccagtgcaaaggacaaatgtgactgtcaaccttccatcccatgtaggggactggtacttagccaagcatgcctaggaaatacgtgcttgtgcagcaggaatgttgaatcacatgtgtgaacacatcatgccgttcacaaaaattatcttttgtattttacctttacctcccgaagttatcttaaattggggggaaaaaatgcatcccccttagaatgtcataagagtgggaagacccagttcttgccacagtgagagttttaagtgctggaggcaatcagctccccagaactcttctggtcctattttccttctttctctttcacatatttgtttgcgtggcttggctggatccgaggtgtatggcatatggctttttgccgcttgagctgccacagaagtaaatgtcattggcatataatgccagatttccattttgtgaatcacagagcacgggattctgtccgaaagctccctggccactatgtgttcttaaagcagaagtagaaaaggaaaagacccacgcatcacacagagatgcttttcctattaaaatgtatttattgccacaacaagtatatataaaatggacatacttttgccccaacgtgtgtttgaaaaaggttcttggcttgttttattgtggttttggcactgggcaagcctggacatttgcttccaagcctcagctgagcagatgctggtcggtcagggaatcagatgaataaaaatttgcttgtgcatgtaccagaaaaaaaaggctgtgagtaaaagataatcaatgttttttggatgcagtttaccagaattttttattcattaaattttcaagttataaaagcttttaggctgataatggagacctgaagctgccacagatgcagcctcagcctttgctcccctgcatggctgagaaatcaagagagagatttgcagattcaaacacacacacacacacaaagatgacatggagccatatgcaactgccagtattggactgtttttgtctgacaaatacagcaatttcaaatggctcaaccaaaaattattgtacattcgtggaatcagttgtatttacccataagcatttactgttggtttctgacacagtcttcttctattattcacagtacctatttctctttctttattctgtgatcatttaactcaccataataagttgtagtaaagtctaagtcaggagcattggccctggacccaaggagtgggattcacaccctagctccttcgtttccttgctgggtgagcttgagcaggttaattgccctgccctgtatcccggtctcttcgtctagagactgatcgtcatggagttgttttgaggatgaaatgaaccaagattaggtggaaccacatgaaatggccaatattggaccacgtctgaatggcaaaatttgtagttctgttctgctcatcttaatcaatgaaaagcatttggggccattcccatgagggaaatgacacgaagatcacacagcacacatggcgctccagatgaggcatggagaggcatggattctagtccagctctgcctgtgacctcctgcgtgacccggggcttttctcctatcctgcactcaccaccctccctcctagacaatgctgtggccccggggatggcctccttctgtgctttgaatttcatcccctctcacctgctctggggctctgtccgttatcatttctaatctttgcatcattagtctcttcctctcacatgctgtcttctcaccagaatataaacacacacaaatctcccacattcttaataataaataaatgattttctcaaccccctattcacctgtgcccctgcagctcggtttctgaagtcattgcctcagtttcccagctcgccttttcatgtattaatccactgcagcctgccttctgcccacaccgagaatataactgagcaaaagaagagaaataggactctaaaaagcactaaaatatagtgtcagtccttgaaaacctctttagccacaaaagtcactgattttgacaaagaatggcctccggtggacagttttaaatctcaatcttgtttgccacctttgtagcccttgaccctgtgaaccactctctccttaaaaattttttttactgtgactttggaaatgaacatacatgcaagatagatatagatatacagatatagatacagacatatatatatttatatatgtatacaatgcacctaagatatatgtacaaatggcacattgaatatacgtggaagaaataaaataactattattgttccagttactagcaacatttttagaaaaaaaattaaaggataactaaaaatataactgagctcaagagaagaaatacgactccaaagtgcattaatatatattttgaatacttgaaaacctctgtagccacaaaagacatgatttctaagaggcaagtgggaattgagaggagtcgttgagttgttctaaatttaagactggaaagaagtcacattgttctgaatccctgctctgatgaagaagagagacatcaaaaaatttataaaaatacatcttttatcccttacaccttcatgctattcgcatcctcccccacccccatctcttctcttcagcctaaaaatataccaaaatcattcctttccttaaacaatattttccaaccctgttcctctttcaagttcttatccaatctctgtccgtctctgcactgccaaattttccgggagagaatgacatctccactttcccacctcctcacctcgacgtggtctgatgttcacccacacccacctgctgcaattgcttcatttagctcaaggtcatcttctgattgttcttgttcatcctgttccctggctctgaggcattgacttgtgttgcctcctgtgcttcctgggatcctctccattcctcattcccatggcactgacccctttagcacaggcattccctgaggccctcctcttttcctctcctaccactgcctcctccccaccttcaaccagcacctgaggcagacagaattccaccctcatcgtcttctgagctccacccctgtggatggtctgcagactcctcaaactcgggatgtccaaagctaaactctccattctcatggctccgttcctgctgctgcttctgtgggctctaactccaggagtgacaccacaatcaccccatatcttggacttgaaatccaggagagatctctggcttccctaccttttctctctagtaggtccccaagtcctactgattcaccactctatgagaagggccacctgccttttaatgctgtgactccactttcctgcaccattatctcagccccagtctctgtgcaggaacacatgccagcatgaaaaatcaattggcttttgtcaggccataaataccaccaaaagaaaatctaaaggtgttgttaagacagaaaaaaacaaaatcattttccttctctcctggaaatagcttaaattttttttctggtcttaaaagaaatcattcctctcaagaatcactttctcctgtcatagcttagccaccctgtgcctttcacttatggactcagtttgttctgtatcctgccttcccgccaccatcatctcttgtgtagacgatgtgtttgttttttaattggtcttcctaaatctggacttgacccaagcctaagttctctctcccctagctgccagaaacacctttctaggacacagctcttctcatgagacatctgtcttcaaaaacctctggctctctcttcttccagcaggatagaaaaactccacattctgtcctaaaccactcttccaaacaacatgtctattacgtctagcagcacacctcctactaacctatcgttagtcatactgagtgcccagcatgccttgcacttcccagtatctgtccctgattgtgttccctcagcaaggaggaaccttcactctttccggtgaaaaatctgcctgtccttcaaggcccaactcatgggccctgcaaagtccctccatggggacaggaggaattttccctcttatgttcacttttcttcccctctcttgtagcacttaacttactcagctatatgctaagttcggaaacttattttagccaattatctttgatttaaatgggttcccattcattctctgtcccacctcatggctaccttgaggcaatgctgcagaattccaaaggcttgaaaatcatatctactctctctgtttcttgactctacccctaagaaccaggactgattctcactcacctttctaccccagagtgcctaccaaaaagaaagaaatatatatgagcttaacaaatgttacttaaattgaatttttatcctattgttgaaaaaaatagctaataatgtttatttttaaatcagctgataaggtcttaaaaggaaaaagcacactctaggacaaactttgcaatctacagaacaaacagtcttatggactcagtttggcattgaagggcattgtgtggctatgacaggaaaaagagtgattcttctagtggcgatttcttttaagaccaagatgaaaaaaattaagctatttccaaaagaaaaggaaagggaatatttttttctgtcttaaaaacgtctttggattttcttttggtgatatttattgtctgacaaaagccaattgatttttcatgctggaatgtgctcccacacagacagggctgagatgatggcaaagacttcccttcccaaaccacgctgggctgagtctggagatccctggcttccagctgtttgtgaggtcaattacacccctctgcatggggaggagacaaggttcctttggctcatcatcctttggctcaatgttggaaattcaccaacattgattatctcatttgtagattatctcatttgtataatacagccatttagaatcatagtcattcaaggggggaaaacaaagatgtgcatatagatgttcatttcattgttacttacgagtgagaaattgaaaatagcccaactattcaacagtggggattgataaattaatttatggatacatttatttatctgttaaaattttttttactcattcagaatgatattcatgaatagtatctaaatatcagaaacatgttttgtagtatattaaatgtgagtagagcagcctgcaaaattatatctcaactaaataaaactacaaactaaaaaggattgaatgattttttttttttttgagacagagtctcactctgtcaccagggtagagtgcagtggcgtgatcttggctcactgcaacctccacatcctgggttcaagcgattctcctgcctcagcctcccaagtagctgggactaaaggtgtgcaccaccatgcccagctaatttttgtacttctagtagaaacggggtttcacaatgttggccaggatggtcttgatctcctgacctcatgatctgctcactgcggtctcccaaagtgctgggattgcaagcgtgagccacggcacccagccaggttgaatgattttaacaatggcttctatgatgttgggttgtgggtttgaaagaaaaatggtttcttctgcatagtgtgattaattatatttttcttttttactatgtctttaatgttccccatctttgctacctaacatgtattatcttacaatcatttttttaaagaaacactttaaattttgtgggtgtggaactggcaccaagctccaggtgtggtctgagcagtggtgtcagtctaggaggaatttctttatcttgacattccatgttataacttcaggctaagtttgtttattcttccttgaaatagagcctgggtttgggccagctttgccagcccagctagtgcccagcatcttagcctgaagttgattggtactgagatcaaaagcccttcaggcttgattcaagaaagactcattaactggaaggaagttctaagcagatgtgatacacttaagaaagtaagccacattgcagacagagctggacccagcacctagaatgcttgtaaaatggatttctgaaaggggtagtgttcaggagtgcttctacacagagcaccctagtccctctcagactgagattgcaggagtgggaggaggaaggaatgggagacaacaggggatgagtcattgagatgttttcagatatcctcatccccatggctgtacctacgatgctggatagaatgacagaagtactcagaagaaggcttgtataacctctctaagtttaaggtttgcagtaggattttgtcttcttggctaagttaacagatacatctagagatggtattcctggtgttgtattagtaaaaccagccctagagggttcccagtattggtgagagctgtgaaaagagctaagtgtgcaatagccatagcacatatattgtatggaaagaatgcaaaggaaaaattacatagaggaagaactttatttaagggagcatcatatgaatagaagctctccaggtgagcagaatagagtctgcttggaaaagatattaaatataatgaaattcatgaacagaaaatgtaataaatggaactttattgttttcaagacattaaggctgtattcttgggttcccaagacttgaaggaaacacagggcgacatgttaaattgcattatctcaggcacttcctaaatattacttgaataaatgcaccaactcctcacttcccactgggatttttttgtgtgtgaaatatgttttctcagtgtatgttcagaatagctgagaggtccaacacaatagactctcacaaaacataagcaagagcacttattcaaggttcagtgtatgtgattgtttcaaagatttgcttcgtcgttctcatgcttttcattgtgtggagagaattgtaggcaatgcattttggaaaccatgttctaaatttagcttgagatgacttggtgggggtagggatacatttttccattgtatatacatggattggttattgcccttcagggccaatttttatttttaatatcaaattaactcttttctgcaattagtagcttcaagttgcaggcaagtactggacaataaaataaaattatatttttttctaaatttaatttctccacaaattatgttatagagcttattcttgatgaagattgagaatagcctgtcaaatatcatttgcttaggggtcatggttcacatttcaaagcttcctttgattggaagtattcatagatagagaacagtttgaagcgatctggctcttacatgctgttgctattgaaagatgggtttaagaacagcaatcctgtttttgtgatggcagtgctggttcactaagactaggcacacacttagttggtttgtttagagaggttatgtgttgttgctgatattcattgtgtgactggtttctgataaagccaacttactaccaagatccaaagttaaaacaactgggtttaaacaggactcaccctagaatttcatatggtgactcattgggcctatgggtaccctccccctgtggttccatatctggctctgtacagacctcttggatccccctttaagcttctctgctttgtccacccccttcagaacatgacctccctggaattgactgccttcatctctagtttcttcttcttcttccttgcttgccagggtaagctgagtctgcttgtgttcttgaccttgttggtttctgtcttgctcatcagaccctatattcttccccgcatccctgatgcactcttttctgatgtagtgtaatccctgttgtcacaggagaccggaatgcataggttatctgtgagccttttcatttgataaaatacctgtgaatgtgtgagaagaaaaagcagaaaaagtaagggcatgaaatgtctaaccatttgaaaaaacatggtgagccgtgggtttaatctctacacactgcaatgaaatttgtcctctaatgagaatatcagaaactagtttttttctcaaaaggtagaattatttgcatgtgaaatgggtgtgttttggaattggaagaggtttacttattcattagatctgaaaaccaaggaggatgtgatgaagctttccttttccgatggtgaagaagctgtttctcattttgcaccatctaaaggatatcctaccattggcccagtcgctttttgtcaccatattgccagtggatgcgcttggcaagactcagctgagaattttggcattttcatttttccttctggcttgatttttcatcagcctgcaattctggagttcatttccatggtatatttggaaaattcaaattggcaagtgataaacacagaatttcaccaactatccctttgaaggctttcagcatgatcagagatgcatcatgttggcccttgttcttcaggcccatgctcttctgggtcagcccattcacttattaggtctgtgatgccccaagaacttccagaccttgactctccagtcctgtgaatgcaaatcatggtcacttctccaagcctggtgctctggaagaggcaggaagaaatgcatgggttggggatctgtttatagatgggtatgcattttgtggatcctggtgttatttcttactgttcgtaggtatcacttacatgttaggcattttgtgggtaataaaaaatagcaaagcccagggaaataaaattcatattaatgactcatattttataactcagccttaggatgcttgggaataatcccacctgctccagctgcttgcttggggagctgtgaggccacagtggggcgtgctgctcagggtgctccacagatggacacctgagtttgaatcctgagtgtcccactttactagatggcaactggagacatgttatctgaatgtcttgagccttcgtttctccatttggaaatggggccttttatagcataggcccatggtaagcactgcatctgcattttttgttactctcctaagcttccacagatgtccaggcttatcacagagagctcagcatcctgggatcaaaagataaagtgacagtgtgacagggtttgcacattctgctcaggatcatctctccatgaaaatgaggaaaagagatgcaggtgcctacgtatgggaatgtttccatggaatattattgatatctccctttgaggataaaaagagctgtaaaaaggtcttctgactatgttcagttcaggttttgcatatgttttggtcttaaaaatgcaccatgtaaaatgattagagataactgtatactggtcagcccaaatactagagaaatatctctccaaagtctcttgaatgaaataaagtagtttcactgagccagtagtggctacacctctgacccattggggaagagtccccacttctgatctcacatccttgggagatatggtctgattcagtctgcactgggcctgttgctgttatggaaacgatatcagtgtgttttatgtgtgtgggctcatgcatgtgcacgtgtgtgtatgagggcattccataagagggctgagatgtaggtggagaagagcctactgcatatacaccctaactgtttggaattttcatgaggctaagtaccctgatgacctccctcataagaatgaattaatcaaacaaaactggttgcagcgtagccatgtcgtaaactgtagagaccattaccatcaccttcattgccagcaaagaacatgaatcctaatgaaatggatactcagtggaagcatccagtttgggaccaggagctggaaaatgaaaggaatgggtataagtgccacctctcttagtgcccggtaaatggaatcccttcatctgccttttaaaggctcaatataaatggtgctcatttcagttaagacctataggtgaactaaggagaatttggacagccagtttagaaattattctataatagtcaccatattttttattcaaaaatacatgtataccgcctaacattcttttttgatttgtggatttatttaaaaagtattacaaaggtataagaattacatcagatttagtaataatacatttaataaatcatgcttatggaaaggaataaaatttcatgagattgaatctgccccaagacaatatgggataaatggtactgacagtgcctgctccaagcagaacaaagagtacaggttgaacgtgtgagcgaaatagaaagggatttcttatgacctttattcagatgcccagcagtgattcccaccccaccccctgaattttctgagtatttgatactgtgattcccttctccttttgtggacagcacatagtaaatctgaatgtgttcagaagctggatgataggctacctatcatccatgtggagcctgtggagtacaagtccattaggtgtatgcagaacaacttcatgccagttcttgggaacttgacaagcagtcatccaaatatgatgctaacaaaatctaggtttccctctttttgaggctcaccagcagctctgtaagctttatgtacttttttcatcacagtctagaaggcgaaaaaatcgccagaaagtccaggttaactaaatagagcacccagtctgggatctccataacaaaaccgctggacaagatcccatgcaaaaattctttggaagtttcctcgaagatgctatagctatttttttcttgaagtggaccctctgaaaatatcgatcaagtcacttattttctagaactaaaaccatgactagctaggtggacgaaagagcttatttgctagctttcaaatagatgaaggggagaaggattgaaggctaatataaaattatctgtttaccttgcaattttgtcttaaaaatgagtttttcaggataaaaattaccttaaaaaacttatgacgtttcacatagtgtcaacaataataatacatagtcttcctaccttattgctgatggttctaataacatctgtattaccctagtgaatgtgttctttgtgaacttgcatgctctctcttcataaacctccctagtaggataactaccaagcaccagactgtgctgtctacccaccctccactttaactttggattatatgatacaaccaggatttgcagtcattcaaaagaaagatgatcttactctcatatagatggtcttttgtaatggcttgaaatagtgagaccctctgtcccattctccaaaaactgcctttttccattttatatgtgggagattaattttgaggtagtcttctcctcctttacaaaaacatctcttagcagtggttcctaaactgtggtgtgcgtaagaattcctggagtgcttgggaaaatattcgtgattctgccccctgaaattctgattggggagagatgcacttggaccccaggaatctgcatttaatgagaatttctaatgtaggtgatccttgtggatcacacttaaagaatctagagcttgaatcccttgattcaaatcctggctctgctacttttttgttgttgttgttatttcagtcaagttgcttaacctccttatgcctcaatttcctcatttgtgtaaatagtgtaataacatctcacagagcttttgggagaattaaattggttaatctagacaaagtgcttagaatgcactggattatgaactgctaggttaattcctgaattattaattgctgaattaattcttaattgctggattaattcctggattattaattgctcaataaatgttagctagatcaacccaacaaatcacagatgtcttgaaatagattgtttcaatcaggtttgtattctgttaatctgtcattcatatcagctgaggaatatatatcttgggttatgttggtgtgttaggatgggcaaggagtcatttaactggagcactgcaatgcattgtcattgcttgtaggataagaaccagactccttaacttggtctctaagcatctgctggtctggtcttacaccatcctcccagtcattctcactgtgatccattcacatttggcttctttcagattttcaaagatgccatgttgcctcctagcacacatgtgttttgtttgggtcactcttcccctcactctcaatttattaacttttactcttcctttagatcatggcttgatgtcactttctctgaaatgcttttcctgatctcactaagtgattatttgtgctaagagaacacagagttcatagctctgtttttatactccatatcacagttatgcttaatatttttgcctcctctattagagtctgcaggttgtaaggcagaaaccttgtcagtttgttgtatcactagcacaagtgcctggcatagatacttgctaaatatttgttgagaaaattattaaattttgattgaggaagacttggatggaatgatggttttggcataaactgaggatttggacagccttcaagaggatgggaaggcaaagggtgggtgtccccatggcagaggagactaggcaggacagttaagaggagatgttccagaaagatggtagagaaaacctgagccatccaccaccctgagggtgaatgttgtctgggcagagctgagaaagattgacagtgttggctttgggtgctgtacctgggtgagactttcttcctacacttagtggcataaagagacaaaatggaaagccaggattcatattcttgaaggtacaaatccaacatcaagaccaatgggcggccaggcgtcgtggctcccgcctgtaatcccagcactttgggaggccaaggtggatggatcacctgaggtcaggagtttgagaccagcctgtccaacatggtgaaaccccatctttaataaatatacaaaaattagccaggcatgatggcacatgcctgtaatctcagctactcaggaggctgaggcaggagaatcgcttgaacctgggaggaagaggttgcagtgagccgagatcacaccattgcactccagcaagactgtcaaaacaaaacaaaacaccagtgggctatagctgagcatttggagttggatggatatggggtttatactgagcttcatttaggaagaaaggaggctgagggcgactgttgctgtttagacagtggatgtgttgtagatggatagttcagcttggcttcaagaatcagaaacacacaaagagcaggtcccagtctcctcagaagcctcatctgggtcattacgggctgagggtcccaggcttgcagagacctttaaggaagagaaggttctccttgaggttgttatgatgccaaggcagatgacgatagggcagagagtaattcttttctctctaacataagcccaaatcggtgccttctgtgacacttaccattttccatcaatctctgtggaactgagggcttccgcagacccctgagtgagattgccaccttatgagccccctcgagtctgaccaggatgtgcagccattcactgctcagtggcgacccctgctgctaaggagagagatggcagcacattcagagttggtgacattaattctagtcatgcaacccggggaatttggagcaagcaggggaggagtctgaggggatgaaaatgggctgaggaaatccagggagatccctagtgttcagggcgccttgatgaggtgctaatgcagaaaagagctgggcctgaacactccgtacttacaaaatcttccacaagccgccagtgtaatcgcttcattccaaaggttggctaggaaccaccgcagtgccctctgaggaataccattgcaaactttaacttttatttgcggagctctcagggctgttaggcaacaaatatttttaaagatacccctctaattctctaggttaaaagttgcagtaattttaattaggggtagaggctgtttatgtttgtttacatcctgggtaggaattagagtataaatcctcccagtgggacccctgctgggatgctctggaatgcttgcattcctgagtatgtgagcacccctggtgtgcatgccttgtgtgtacatggcaaggtatcgcgaggtggttctatgacatttctggacaaaaactgtgtgtgaagagaaggtaggagaaagcaaactcacaatcaaataaaagtagagagaggggaagagatgagattgcagttgattatgggtctggcagcagatgttctgcacgaatccaactcgctgcagccagtctgtttctatggcaacagaatcggtaattattgagcccaggcactcccccacttctcccaacaaggtggaggctgatgaatatgaactatctccagcccatcaccagctttttctttttcttcttgtccttatttgttttttagttctttataagaaaaagtgggggatatattgagaagtaccaagacggggagctatgggtttattgacaaaagagcataggacactaaaatagaaacgaagttattatttttctcttgtgatactctaagagaaaagctcttcctggaaaagccgatgatctctgaagatgctaaataaatgagcaggagtttccctgaaatggaggcgccctttgattggctgatctttccccgactcctgccaatcggagcatccctgggctccagctccataaacataagcaaagctacatgcttattcttctggacttggagtgtataccatttaaaggtgtgcggcgggtctctgttcacatggctcaactggaaacctgtttcatgaacaagcttactcaggaaccatctggtggtattccagcacattgttcttcagggggacgactctaagtcgctttgtggtggcagcagcttagaatcagtatttgtggttgggaaagatggacttacgggagcttggtgagtaaacctccgtctcacacatgtgtccaccggtattatcagcctgagctaaatgtagctttgtcctattgtctgccgagaaaactgaattggaacaagcacatggaggagcgggcattcaagggttcccatgatgtaggagactctgaattcaaaagactgcatgctttgcttgggtctgatccgatttgtagctgactgtacattatacttggacattggttgtcttgttaggattagtgtaaggagcagagttctgctttatttccctgggtgttgatgcatttcaagagaaaatgcttttaaagctacattaataataagagtcaaccctgtgtattgctaggaagagagaaaaaggtgcaggcacggagcccggagccgcttgattgtgttgctggtgtttgcattgtgaagagagatgttattacaatggtctgtcaaacacttcttcagacccccagccacggaatgaagcatctcttctccgtgtgccactgttctctgcttggaaaatgtgtaactgagctaggtcatgtcctttccttttatgaaacctgtctccaaattgaaatatgttttttaattaattgcaaagataaagtgaagtgcaattggaaagattttagcagtcaaaaagcatgcttcaaaatgactctattttgcatcctttcaaacccctgaaaaaccagagagggtttgcaaagttatattcaaggattggctctctgccaggaaagggatgctctgagctattgctctgctccctggggtttaattttctgacactggtgatgaaattttcaatttcgttgggtagaaacaggaagaacaagaaagcagtactataaacaggcaatggaggggcagcgtggggaacgagaaactctttgcctgtagggacccttctagctgcaaacttaaaaatgtatgtggcaagatgcaacccaagcaccgagcaggattccagacgagttataatcattctgaacggggagaggaaaggtaatgccattggcttgggttgcagagagtgggggctgaagttggggcttctatctctgcctaagatcttttcccctgattgtctcctgattttgaggattcatcatgttactttttttaaaatgtgatttcctgtcttatgtgcctgaaagtgtcatagcacacttgatgtcttctatttacagtccacttgacttcaaataatggagagaggaaaagagaatgaagcatctggtttatgaagaaatgcacatgaaatagtcaaacaagagaaatcttattggttgtcctttttaaaaaatgtccttttgcacaggagaatgctgtgggtcttcacgtggctctagaatagaatttactttatcctaaatgggacctgtgatgaatggttacagaaacagaagagctagaaagctttcgcctatagaagactcaaggcagggtgagggcgactgggtgtctgggagagaccttctactctgtctattaaagaagtagggctgacgttgcaggagagggagaatttcctaactgcgggtgacaatgcatcagggacacctggtcacttgacaaggtcagtgacctgtttgttagctgaatgcctttctggagatgtaggctgctctctgatcccatgaggctccagatggctggatacattgagaattctgcctgactggaagagcttgtgtgcatgttaactctgcctgctgcaccacactcctcagtacacctcgatgctcgattttgaggaagtctggtttctagaggatgtgcattaagtgacagtcagctcgttagagtcaatgtccatttcgccttggcctcttctctcccccactagtgtcactttacatgagcgaagtgctggcacctgttggtaagaatgagagaagaaaccagctttttatggaagcagtaaaaaatgtttacaaaaaaaaaaaaaaaatctaaaacagtagttcttaagctattattggatcatggaactctttaagaatgtgaaagctatgaacctcctctctgctccccccacctaaaaacgcattcatgcacaaacacataacactttgataatcaggcattttagggtaaagcaagatccctgtcctgggggaatagccaagaacgtatcataccctgaagttcattgtctccttcttttcagatgggtccgctaaatgctgcagccccatctcaatctgtcctgagcatttactgtgtgccaggcactgctcaatacattttatatgtagatataataattcattgaatcttccagcagccctaatgggactaagtttttttgcctgttttagatgaggaaatttagtcgccaaaatattaaggaccttgccggtgtttatccagctaggaactgacaagtgtttggtgtttcatgcatgtcgatgtacttgttgctgcattcatatgtggaaggagagtgagtatataggggaagatggtttcatcagcctgtcagtctgtcaagtggagtcagaccacaggtagttgaattaaacaatcaccacaataattaaagtcaaattgaaaaggcattttggggtggttgggtgaattattaataacgccatttgggaagtttgagctaagtaaaaagcccatcacaaaatgccccattggttgcccctttatgttactgtgtgatgcaccatctcattcctgtagcatttatttgcctggtatgatttgggtcaatttacctaggagaccagttccttctgggccatctgggagaggtgacaggtcaccagtgtcccatggctgccctttgcttacatttgccaggaatgatttgcagtggccaaagcaatggcgagggtgatgaacaactaggaacaaccaggcagccagtttgggggttcccatgaactgcaatggctgtaggaatcaccaggactaccatgctttctcaagaccttgtgagcaggggaggcgggcccagctcagaaatagaaactgtgttcgtcagagtttgagggaggattgatggctgctagggcaatgtggagctggatgggtgtgtgaatcctccactcctggttcagccactgcatctccccttctatctgttttataaatggattcacaatgaagatgtaacaataaaaaagagaaagaaggggttaggctgctagaaggaagaataaaagctattcatcttatctagatgtcttatctgacataaaaaaataagcaagattgcaatgctaagtggaaaggaatctgtaggggtcatggtaacaggtttttaaacatgggttcttggctatgcttgcctagtattatgcactttctagtattatacgaggtatgtaaatgtgtagaagacattttaacaagactacaaaaaatgtactacagggacaatatagcagatctcattttacattgatgctgtccaatggaaatatgatgcaagttaagtatgtgattttaatttttctagtagttcacctgaaaaaagtaaaaagaaacaggccagttaattttaatgatatgtattattttacctgctatgtctaagttattatttcaacatgtatctacaaaactattaacaaaatatttacattgaatttttcatgttaagtctttgaaatatgacatgtgttttacatttacaacacaactcaatttggatactggattttcacaggaaatctgtatttagatctcataaaattcatagttaaaaaagtagattcatgtgcacaagttgttccaaacatacatcaaagttttccaataaataactgaattgagtattggtttttaaatttaaatgagctaaaattaaataaaatttacaattcagctgcacagtcacactcaccacactcactcaccaaggcttccctagccaccgtgtttagtggctactctactggatggtgtggcactaggatctcagaacattccttgcacactaggccagtaacttctctcactccatcatcataccacagcacctttatctcttttacctccacaaggtacctggaccacctgctctggtaacagagaaacagaatgttagtattcacaaacatgttaacttttactttcaccgttgctcatggtgaactcaagatggacagctaaatcttagtttctccattacactgtttggcaagggggaattaaaacagtatgctgtttcctcttgcagaaagtcggcactcatccatctgtggcatttctttcttcatccttacttatcttggccctgctatttactgtgctctctggcccctctctcaactcagtatggaacgtgggtttaattttaattataaacaaaccataactgagaaggtaactctgttacaagcagataattcttcatgaagacaagtataaattcaggctaaggagtgatttaattgctatcatcttattcaattctacaaattttgtttagcgagaaaatattgactaaatagttctttcagttaatttggtcttcaaatccgtgccttcaataccagatattatcctatatcttcactccccaaaagatttattttaatgtaaaactcaccatgaaaaagtaatcagtctcttcaataactagatcaaaaccatcctgcaaagccttcctagaggcatctagtcttagtctcctaatgatgtccccagttgatgatttcacccaaatcaaacgggtgaaatgagtgagctttggaaaagtttaagaggactgagcttagagtgagctttggcctccatttgccaaagctcactctaagctcagtcctcttaaactttcccttagctctattaagaattctgcaaaacagtaagaaaaaaaaaatccatgtgattaaataccatctttcctatcaggaatgccttctgacccagtggtccccatttcctgcattttggacagaattcccaagaatgccttgtgaatgttggttggagtaaattgtgtgggtcctttacaacttctttcttttgataatattacttaacattttgtagtgaagcaacactggtggaacaaatagattaaaccataggcagggttggatctcagagcaagatgaattgctttgtgtatctgctgattttcagccaagccaaggcctaatactctcagtcatgaatggaaattagtgatttgggatttcagtgagtgcagagatgctgggaaatagctgaacatcacatacgtaaaattatcattacaataagtatctttggattaccacaggatttggaagtctactaatttgctagctcatttcaagcaatctatgatattctagaaatacaggactagaaaattattcatatgatgatgagcagtaatctagaatccaatgctttaaagtgtggtttctagcttagcatctaagttttgcaagttatttaacctttgtgcttctcagcaactttacatgggtaaactgaagtttagacttggtgacttcctatgtcatatatgcgtcaaacttctgaactatctatccgtctgtcttctggcgcccatgttccattgaaaataacggtctttccaggtgtatccagatcgagcttcagaatccttcttaacacagcactaagtcaaccgctagtgagatatcagaattgtcttacagctgaaactgatttttcatccctctcttatgtccttgcctcagctcagtgccttgtgcaagactttgaaaagaagcatacagggaattatcatcagtatgcagggttttggtgataaggcagacagctctttactcatcctcttgctcagctgttccgtggaggtgttgccatctgacaaggagggctgcagccttgcgctttgggagctaacttctcttttcctttgagctgtaagtgatgagagacctgtcaaggagagctgttcactggcatcattcccagacctggaagtataatgaaataaagtttctttccaacttggttggaattcttgcagctgaatatttaagatagcatctggggcagttctgacgtccacttgcctggttggaaagaaacacccatgagctaatggaactcaggccttcacactggtagcccaagtcagggctgctctgggcaactcagttctaactagagtcatctaggccacaggtcccagcaggtgagatggagccccctccttgcctaatgagccagcaatttgaagtccgcatttcagaaactttgtcatatacaaagagggatatcaaagcaggagctggtttgaaaaccaccaacattggcactgtccctagacctagactacttaatgctaaaggttccagggcactctttctagtaccatgagggtagtagcagagccacaccttttagctttagagattgatgggggacaagggatgacagccgcgtcctagattccctgagccagcgtcaaatatctgggcaaagtaggcgtaagaagctttgcaaagaccaccttatgagccatgcttctgtcccctctaaaattttctgagaactgggtagagggactccttaatctctgtgaaccttagcttcctcatctgtagaaagggaagaaggtacatttcccatgaggctgttaacaaatgaaaatataaatgatgtatgtgtgagtgattagtaaattataatatgtatgggaggggaaaatagtctgattccatcccttgggtagaagccatttatttttcatgtctcacagaatgtctagttctgctcttttgccatggaagtttctctctactttcagattattctcctaaataatcctcaggcactaccccaaccctctagcattaaaggccacccagagagaaaggcactacacttacaagccagggcctgggtcaagtttcagcatagccaccaagtaagatttaggtttcgccatgttgccccttcaatctttagtattttttctcctggataaaaatatagatcttattgactctacctggtacatagaaatgtttagagagcacatttattaatatatcccatgtactctgtggattgtaaaataagggcttactattatgcttcaaatctaatatctcctaacaactcatccttgtttattgaggaggaataattggaaacctatttctagggtagcaaaagctccagaatgtggagctacagtgatgtgtatgtagtttcctggttttggaagccagtcaacatcaaatgatattgtgcttctagggagatgcctggcggcattcaagaaggctgtgacctgccataaataatcggtggcttttacatttgtaagtcaagatgttcttggtctcagcagatggcccataaatctttctggatagctgagctttagccatcctaccccaactctttcttcttcttgaaggcataatgaaagctttgagaaacatgtacatttttggttctttcacatgcaggttcccagccacttcttgatgactttcttctccacaccccctgcactcccgccggccatgcacttcatacccatgatgtattctgtcaagagaggagaaggggtgatttctttctctgtcacatctggacatctatttactgtgaacttatagcatcctagatcttgaagtaacctgagtcctaggatgtcagatagatttcatctggtgacaacttaggtcccctggtgtggcttcctggggctctacctctgggctccatgagccaacagggagtgaggggagggtagtagcatgcagttaccttattacaggtaaagaaagtgaggttcagaaacattcattgacttgctaatatccactgttaacaagagacaaagttcacattttcttgctcaatttattcaacaatcaatgtttgctgaatgccaaccctgtatcaggtactgttctaggccttgggattcccagctgtgagtatatatggattaacctgcatggagatttatttttcaggcaatcattagcctcagagttggaattccccagaatatggaagctacaataagaaaaaaattcaacaaaccacatttatttatgtattcactaagtcatctgtgtattcacctatgcattcatttccatgcctgtttacctgacgaaaatttatccactttcaaaaactgggcccttgtaagagttgtttgaaaactacttgaaagtaatcggtgaaaacaaattgtccaacagctatctttgccttccgccctccttcccctctaaacacctaagagaaactgaactgtaaaaacaaattcaagaggtgtagctatcctagtttcacaaagcaacctccaaggagaaacctgggcggaccaaattttttctactttatcaaaagtttctgaactgttagaaccgttaaggagaaagaatttgcaactaaagtgatctagaactgttgcaattccatgtgacttgggtagaagtataaatggcaatggatatgaaagtctcttatccccaaatttgaacactgtaggtaaatatacaataatcctatccactgtgtgtggtgatctgtctctgtctacaactctgactccccattacttgcttcaaggccagaccaatgtcagaaacacttgcactgatggttttaagagctgtactctctgtgtgccaggcattttgcatattcctttaatgggatttcttaaacctttttaaaaattttcagtgtagtgatcattttaaaattaccacatggcatgctctgtcaagcaacaagttttatggaagagtacatcctcctatgctcaaaggatagagggccagactcagggagactccaattctcagtctctgtccttttcctaacagtttcagtagcgtgctaaaagcagtgttaaaaggcattttatccccttttatagataaggaaacagacacaaagagagttagcttattatccggttagtaagtggcagagtgaagttcaaatccaagtgtgtcttgattcccaagcccacgtttttactgaggtcaggtgcctccatttcaacaccaactgtaggtagatctatagctaatacactggaaaagtaatcttcaacctgggtgctcattctcctgaatggtgtgaagacttttcaagggaaaggaaggcatggataattagccttacaataatccattttcagattctcagcttccacacgtacattaaaactgatcatcttgcaactgcacctgtggctttcacaccaacttttcccaaccactgttctccctcttgataaaagaaaggcccctgctcacctccatcaggtcttactatgatgtgttgctcaaagtatataaaccttctctgagagccaaacaaaaggacttgtgacttatcttttaaataaggaaccataagtgggtccctgtcacgttaagagatgcgttcccaatgggatacttctcttgggtttggaaattatgtatcaaaatttgtaataaagtctcgttttaattagtttatactaataataattatgctgttaagctcaatcgagaagaaaagttttattagcaccttctgttcacaggaagtattttttaagttagatttcagtgtgtatgtacgtgtttttgtttcagagaagtatgataggatgataataaaagacttttaagcataaaattccattatgataaaattctgtatgagtagaattgaggtagagtggggaaaatgggaagtaaaatgggagttttggttctaggtcaggcattagtggatgatggcctgtgggccaaatatggcccactccctggacttgtaaatacattttattgggacacatctgtgcccatttttctgtgtagtgtctgtggcttccttcatactacagtggcacagttaagtagctgtgacagagactacctagaaagcctaaaatatttagtatttcggcttttacataaatcctattgacccctattcaaggaggaaaatattgataacaatttccaactattcgagaagagattattcgtgtatttttgagtcatatggatctcaaatcactattgtatgtacattcaactatatattgaaaagatgacatacaattttatcttttttttttttttttttcaggcaagtgtcactctgttgcccaggctggagtgcaggggtacgatctcggctcactgcaacctctgcctcctgggttcaagcaattctcctgccttagcctcccaagtagctgggattacaggcatgcaccaccacgcccggctaatttttctatttttagtagagacgcggtttcaccatgttggtcaggttgctcttgaactcctaacctcaggtgatccacccgcctcggcctcccaaagtgctgggattatagacatgagccatggctcccagccagttttatcttttaaatgtcaatattgtagtacactgaaaattatattctttgaaactatttcaactttgatgaaaattttctgttttgttttatttttgagacttgctctgtcacccaggctgcagtgcagtggtgcgatctcagctcactgcaacctccgcctcccaggttcaagcaattctcctgtctcaaccacccaagtagctgggattacaggcatgtgtcaccatgcctggctaatatttgtatttttttaatagagacagggtttcaccatgttgcccaggctggcctcgaactcctgacgtcaagtgatctgcctaccttggcctcccaaagtgctgggattacaggtgttagccaccatgcctggcctgatgaaaaatttcatctgttgacttaaaaatgtctgagcgatacatatagtttttaaaatagggagtggggaaatcactgctgtgtccggaattggtgggttcttggtcttactgacttcaagaatgaagccgtggaccttcgcagtgagtgtcacatctcttaaggtggcgcgtctggagtttgttccttctgatgttcagatgtgttcagagtttcttccttctggtgggttcatggtctcgctggctcaggagtgaagttgcagacgttcgcagtgagtgttacagctcttaaggtggcgcttctggagttgttcattcttcccggtgggctcatggtctcgctggcttcaggagtgaagctgcagaccttcgcggtgagtgttacagctcataaaagcagtgtggacctaaagagtgagcagtagcaagacttattgcaaagagcgaaagaacaaagcttccccagtgtggaaggggacccgagcgggttgccactgctggctcgggcagcctgcttttattctcttatctggccccacccatgtcctgctgattggtagagccgagtggtctgttttgacagggcgctgattggtgcgtttacaatccctgagctagatacaaaggtcctccacctccccaccagattagctagatacagagtgtggacacaaaggttctccaaggccccaccagagtagctagatacagagtgtcgattggtgcattcacaaaccctgagctagacacagggtgctgattggtgtgcttacaaaccttgagctagatacagagtgccgattggtgtatttacaatccctgagctagacataaaggttctccacatccccaccacagcagctagatacagagtgtcgattggtgcactcacaaaccttgagctaaacacagggtgctgattggtgtatttaccatccctgagctagacataaaggttctccacatccccaccagactcaggagcccagctggcttcacccagtggataccacaccggggctgcaggtggagctgcctgccagtcctgcgctgtgcgcccacactcctcagcccttgggtggtcgatgggactgggcgcagtggaacagggggcggcgctcatcagggaggctccagacgcacaggagcccacggagtgggggggaggctcaggcatggcgggctgcaggtcccgagccctgccccgcgggaaggcagctaaggcccagtgagaaattgagctcagcgccggtgggctggcactgctgggggacccagtacaccctctgcagccgctggcccgggtgctaagcccctcattgctcggcaacggcagggccggctgctccgagtgcgggccgccaagaccacgcccatctggaactccagctggctcgcaagcgccgcgcgcagccccggttcccgctcgcgcctctccctccacacctccctgcaagccgagggagctgtctccggccttggccagcccagaaacgggctcccacactgcagcggtgggctgaagggcttctcaagtgccgccaaagtgggagcccaggcagaggagtcaccgagagcgagcgagggctgtgaggactgccagcacgctgtcacctctcactgccttagaagacaggatcatgaatgtggcttccatagttcaagaccatcctaatgatggactggaacttgtttccttctcatggagcaaattgaggcctatgtgggcatctcagccctcactcagtctattgctctgcaacttagatggtagctgatagagacatagggccctaatgggacattgttaaaacacagtctcctaaatgtcaggcctcagttatatagatcagaaaaattttccctgtactggcactactgattagccagctaggggagaaaaagaacagcagtctcgctccaggaggcagaaggctggcctttatcctgatgtacctgtaggatggatgggagcctgcaccatgctctggcttcacggattgggttgtaccactcaagtggacatttaagcctgcttagaaaccttgatgcatgttatagtttgaaatatgtcctcctcaaaaatatataccagagtcctggcctggcatgggtggcttacgcctgtaatcccagcactttgggaggccgaggtaggtagatcacctgaggtcagtagttcgagaccagcctggtcaacatggcaaaacctcgtctccactaaaaatacaaaaattagctgggtgtggtggtgggcgcctgtaatcccagctgctcaggaggctgaggcaggagaatcgcttgaaactgggaggtagaagttgcagtgagccgagatcgcgccattgtactccatccagcctaggcaacaagaatgaaactctgtttcaaaaaactatagatatagatatagttatatagatatatagattgaagtcctaacctccgaaagttcccttatttggagatagggtcttacagaggtaatcaagttaaaatgaggacatcagatggaccctaatccagtgtgactagtgtccttataaaaagggaacactggatgcagagacagacatgcatagaaggaagatgatgtaaagagacacagggaggagacagtcatctacaggccaaggagaaaggcctggaacagagccccttacagccttcaagaggaaccgaccctgctgatgcagacttccagcctccagaactgtgagacaatgaatttctgttgtttaaaccacccagtgtgccatacttcgtcatggcagtcctagcaaactgatagagtgcactcaaaagcacagattcttttcatggactttccaaagcccagggacttctgtttcttctagctgtgttttgaaattgcgacatggcatgggtcatcaggatacgagttgttatctccttcccgtaagagcaattaaggtcaaagactgaagccagagctcttgggtttaagtcccattagctgtgtgacctctggccctaatggtgtctcttgtaaaatagaataataatacctgcttcttagattacttggaggaccaagtgaattaataacatgtaaaactcttggtgctcggcacataataagtgctcgacaatgaaacgttcattgccattgttggggggccagaaagcaaccactgcctgagagcaccccagacccatgaatcacacagcaagaaagaaagcccgcatggtcccctggaattctagaagttttatttgtgaaattaccttacaaatgttagagaggtttaaaaaaaatctctgcttgtcttttctcttgttttatcctgtcttattcttggaaaagttaatatttgagaatagctagcatgtcctattaatcccttttttagaaaaggacccgctccgacaccagttggcagttaggtttcatcagtcactcgagattatggattaactcactgatctttttaccctttgagctaattagcctctggacaaataccgctagtcacagaggccaagcacagctgaccaaacacatttcaaagagtaaatttagtgagtaaataacgccaggcttagatctcttggtaatactgcttttctgaatcagtggaatctggatgatctttccttcccagggagagatggaagtgtaatgtttacaacccttcaaaccaacagaaaaaaatgtaacgaattaagtcagctacttcctcccttgactcctcctgttcccccatttaaaatgatttcttttcttatgtcttcaaataacaagctcagtttgactttaaatgacttaagtgtatcctttgggatggttgtttaatagacctctttcaaagggaggcttccctgtatgcccagctgaaacataatttttctcaatttaatttaattatcaccacctgccaaaactttctctcgcctccacaaagcaccttgaacagttcatgcctcaccttggtggtaaggcctgttaagtacttgtagataattatcctcttaatgtttggtgaaactcagtgtttctagacctttcgttctttgctaaagaagacttctccaggtagtcctttccaagctcccttcaagttgtaatgattcatacacacaacttcaccagtgaggcctccatacctgggtttccacagttgcagggagaacatctcccaagggtgggcccatctccttggcaatggcagtgaggatggtgtgtcattctgatgtccagctctgtcaggtaccaggtagctggaatggcaaggctcctggcctctcccctcatgtctccctcatgtgagcagccttatcctgtgcgtcgatgttcttctgaatgccatgttttttcctaatcccactctggagaatcaggagtttcagactgagtggccagctctgacattgcacaaccacatacctaagtaactcaggttttgtgttttgttcttgcattgaggaaaagagaagacaggaagctattgtgctcttatttcagaagagtggtaaaagtgtggtcattttgtcacttgtcaccagtattcagtgattcaacaaaacctttatcaagtgtatactacatgcctagtaatgtgccagggacatggaaggaattcaaaaagaatacaatccagcttttgctctcagggatcttagaaaacagtgaaaagcttataagattgtaagcaacattagctagttaaccacagagtgggaagcctccagtggactaagttgcagtccactgttttgtggctaccacatttagaaaaagcacactccacactggcatggttttcccaaccaggttatcatgtctgctgctcagctgcatctggataaattgtgtaatatgattttattgtatagaatgccgtgcatgtgtgtgtattggacagaggaagattaccaagaaataattcatggaacaaagaaggtattaggacagcattcagcatatgatccttggtgtgcgtgtgtgtgtgtgtgtgtgtgtgtgtgtgtgtgtgtgtgttaagtgtatgaatgtatttgtgtgtgtgtttgtgtgtgtgtttacatatataaggagagcctgaaaaatgaatacaatgctatcaagagtggataatgatggagaatgagactggagaatccagaagaagagttttatttttagtatagtattctttagtacatatttttactatcggtatagtttgacttttataataattttatttaaccatcaaagtaaattcttgaaaaatagaaatcttgttaaaatattaataaaaataaaaccccttacaataatatgaacaacagggaagcgactaaaggggttcataaagggaatgttttactcttgactttaattattaaagaaatatgatttatttagagtttgttttggaaatatttaaagcagtgattttcatcctttactagatgtagccaccttttgagtcttttaaaaattaagacccagccccaggatcatcccagactttctaagccagaatttcaagtgaggcttaagcaagtgtgtttttaaacagcacacacacctcctaccccacacccccaccacatactacacacatataccaccaccagcagcttcctcaatcaattctgatgtgcaccaacttaaggcataaaactagggaagtgatgcaagtggggggaagcaattgtggctgtaaacatactgagttaaacttcctgtgaaatgacacagatcttaaattgggttgaaaaacaatatacaatatcatgaatattgaattcaccacatatcattatcacccaaatatgagaaaaagctagaaatgcaagaagaaatgaataaaaatatagctggactgacattcattacactattactctagtatgttaaaatataatctatagaatacttcaataatataattaatgtgtcaactaataggtacatattgaattgatacctttaaatatagctgtgatggcatgtctttacatggtaactgtattatgttaaaatataatatatagaatactttaataatataattaacatgtcaactactaggtaggtacatactgaattgataccctccactgagagtatgccttatttttcagtatccatgcaactttttcaaaaatgcatcacttacatggctaaagatcctcaataaattctcaaaggcttttaaataaccactgaaccaaagaggaaatctaaactactactaaagattacaaaaatgatgacagtgagaacatcacatgccaaaacttatgggatatagccaaagctgccctcaaatagtatatttgtagccccaaaattattttttttaattatttatatagaaagaatgaaaacaagtgaactcaggatataactcattttagaaaataacaacaaaagcacccaaagaatacaaaaggaaagataatgcaaggcaataaactagaaaataaaagaaataatagaatcaataaatgaatctaagaactatttctgttaaggcaattatttaatagaaataattgacaattgacattgacaatctatcaaataaaatgtagagaaaatgtaagaattaacaaaatttaattgaaaatgacatagagacatagagctgattaaaatattattaatgaatttaatgggtggcaatatgccagtgtgctttacaaagctcaattagtacacccagacacgcatgcctgcacaaacaaaataactatgggctatctgtgaataatatatttgggataaaatatatacattgctcataaagcaaagtgtcatactttgccagttgaagtatagattagtacagtctttctgaaaatggcaatatatattaagaacttaaaattttctgtgatatttatccttctattccaagtcaaagactttatcctaagaaaatcagaagtgcagaataaatattctttgatattttaagagagactttaggaagactcatgtcattggagtgagctgatgatattaatggttgtggggagaaataaaaccaatagaatgatttcatctagaaaaaaaagcatggaattataaacttaaaaataattctggaagactctgcaccacaatgttaacactcattattgcagtgtaaggattacaagtgatttttaacttcttccttttatttttatatttctttctaatattactcaattggaaggtaatatttctataattagataataaacttactaaaacaaaaatttaatataaacataatggaagggttataataacaggcaaagcacatacaaaaatcatgcctgcataatatattgagactgaggatgccaccaaatcctgatgttccctggttagtttgtttactttccatttccctgaaaggggcatgaatgagaggtggagggagaagatattagctaggttgcattctctttccaaagcctgaattcttttttatttcgtgtttccatcactgggtcttttatcattaatctctaagatgtcagctgttcatcaccaggtgcctgaatccctaccagaaactcctattggtgttacctatccagggacacggatttctcttgctctttcctttctctgtcctttctctccctgaatctgagctgctttctggaagtggtcagcagcaccctccctttgccagaagtgcaaagtttggccaacactccccctagtggcaatttaacagactcctgaactgaccaacccaaaagccaaggacgagcactgatgccacgctgggttagctggggcacttgttaattaaagacatatcactgggccctacctcaggagtgtggcccagaaataggtattcttttttaacaagcatctcaagcatgggtttttgtcccatttgtacccttcctttgtcatttttatggaatacatagtgattgggattcagttttttatagaaacttgattccaatttttagtactgaatgtgaaaaaaaacattcaagcttcaaatcgattggcctagagcatgtatttcttatattttagagaagaggcaataggataagagagaagctcttgtaaactaaatatacatttctaaaaagaatagagaccagaggcgtttgttataatgtcctccagtgaacacttgtgaaaagactagctgctactttattctacctgcagctatgtcagtgtataaattacaaccaagcacgttataccttggcactgttgctttcttattctccatgtctatttctaaacatcccctatacgtgaaatttgttctccagtggccagcgagccagcctctttggagcagcctgctgatttaatcaacatgctgcttatcatgttttccagatggttaatgcatctcttaaataaaactggccctaatttgaactggtgtttctattctggtcctttctgaagaacaatttgtcttatggtcaaagtttctttttcattatttctctgtaggctctggtgatgtctttttaccacttctttgtttaaaactgccaagtggcacattcattcaattcattgatgctaatcatacatggaggaaaaagaagacagttcatattaatatcaacacattcctcaaatcatttatcacttacacgtaaagttgtagagaacagatttgtcagaattattgattgagaaaggaaagagccctttgttgtggaaccgtagattggtgttttctcttcattgctgcttctgcttcgagaaggagtataaccttgtcacgtgaaacagcattatttggggagcagtagatacaggccaagtttttaggagtctcagttaaaaacccgtggtcttaatattcagtgttacacaaaggattccaaatataaataaccttcacgctgacccatagattcaggtctgattcccatttcacaaatgggaatacggccaaggtatacagttaggtcatataaaagtgacattaaactcatattggcagaattccattgtggtgtgacttctgcaataatgaatggctgaaagtaggcaagataatgtaagacttgaatggggttgcattctgaaaggaaggcagccagaggtcctcagaattaaatggaggacctgcagtaaaaatatggctctattacaccaagcattttcctcttttcctttccattgcctgtctgagatgatttggcagagtttaaaaataaatgaagtatattcatttttccttcagagtttttctttgaaggcatttggtaaggggacaaaatgaaatatgaacacaggcaggatgggggatcaagacatcaaaatgttagcattatatccaacatatatatccttatgtgaggaggtatgcttgcttccaattaagatgacatcatacaggcggatgtgatgcttccaagcagtgttaatgatctgctaggtaatgcagaggaaatgatgtgtttggaatgggtttttttttcccatttgtacctttccacttctttatggactgcaacatgtaatgattgggattaggttttttatagaaacttgatttcaattttcagtactgattagagacaggattcttttgcaggcatatcagttatgttgatcattgcttttcacattttattgtagctgccaaatccttattataaacagagtagaaccctacatataaaacccacaaaagggcaactctgagggaaaccaggttgagcatctcggcaattccccttactgagccattttctccagtgcctccctctcttctcccatagctgagtccgaaaacaatcttctgggagaaaggataaggtttcttctgtataacctaggggaaaagtgcctttaattattcattcattctctgctggaacaaatatttattcggtgcctatgataagccaggccctccctcttctagacactgggctgcagtagtgaggaggaaagacaaggggactgtcctcagggaggcagcgggggaggcagccaggccaccccagccatgatgccatgaatacattaagaatggggagaaacggatcttagggagagaactcatggggaaaggatggttgggtaaggcctgtggaagaaaccaggatgctgaggaagagtggccacatcaagtgcttgggaaaaagtgtttcaggccaggaaagctcctgaaatcccagagacagaggtattcaaggaatgggaagatggccagagcccatcctggatgggggatgcggggggtgatagtggccaagaggtcagagggaagcaaggccagttggagaacttgtactaggctgtgatggaaactcagtatttttcattttaagtttgcttttaaccttggtttaattgtttattattaaacatcttatgactaagctgtttatatttgtattccttcgacttccaaaatggctttgtggtaactcacgtatgcgttgtgtatgcgcaggttcatttggttcataaaagctctagaccatgtggaggaggaaggaagtaggttaactgtagggtattgtagtgggattgagaattttaaaagccagagtagaaaaaacaaaaaaagaaaagaatgccttacataattctaattagttaaaaaaaggaaggcccttcattcttaaggaaagaaacatctactactaaattctaaacctaatgtacagacttaagtttccaaattacaatggttccacttaagattttcaactttatgatgatgtgagagcgacacacattcagtggaaaccatactttgagtactcatacaaccattctggtttttactttcagtatagtatttaataaattacatgaaatacttaaccctttattataaaatatactttacgttagatgattttgcttacctgtaggctaatgtaggtgttctgagcatgtttaaggtaggctatgctaagctatgatgttcagcattacgtgaattttcaacttaaaatattttccacttacgatgggattattgggacataatctcattataagtcaaggaatatttgtatttcactgagtcatatacaataattcatcaacaattctctttatgaatattaaatgccaaatatacaaaaactattggcactctagggagtgcaagccttaatcagacataaattctgccttcctggatctttcaatttaataggatatataaagaacctacacaaataactgtactacaagacagcagatacaaatattagttttcatgggatctaaaggtaggttatctaattgctttctgtcaatttcagatatcacattaaagcatgactctgggacagttccaggtgaggggaaagagttaaagtaaccagtcaggtttatagcttttctgtaatcaaggacttaacacacagtacccaggggcagggcagaagggcaggttatttaagatgtccttcaaagttgactctctcaggagtctgggacacaggtgttctgcataactaactgaagacacattgggtatagacatataggtgacaaatcaacactgttacgaaatttcagtggtgctttttgttcctattaagacatatgttttatatagaactaattcaatcttacaggtgaaaatcagagaaactaggcatcctaaaaggaaaaatgcctctaatccatccacccgaagaaaaactgcaggtattttggtatttatctcttagacatttttctgtgtttgtgtgaggggagtatcacactatcccaacttttctgtggtcccttttcctcacttcttttcacatcaagacatgcagttcaaagatgcctttatttatttatttatttatttatttatttatttatttatttgagatggagtcttgcactgtcaccaggctggagtgcagtggcgcaatctcggctcactgcaacctcttcctcccaggttcaagtgattctcctgcctcagtctcctgaatagctaggagtacaggcgcacggcaccacgcccagctaatttttgtatttttagtagagacagggtttcactgtgttggccaggatggtctcgatgacctcgtgatctgcccacctcggcctcccaaagtgctgggattacaggcgtgagccaccacgcccagctcaaagatgccattactaattactacatgacactcaagtgtaactctatcaggatttatttaaccagtcttctagagttgacacataggttgttctcagttgtacgctattagaaataatactgcgtgaacattctttaaaatacatcttttctcacttttccaattttctcacttttccaattttccgtaatacttttccaattttctttaatacttttctaatagtggggagaacagtgatttgtgattctatgtctcactgagtcacacacatacccaaagcttttatttaagatctttgtttattgatgctaactgcagacaatgctaagctttcctttttgcagaaggaaggaggacttcaaagcacctaaggagctcatgaattttagatttcctttgttgtgcttttcttcccacccccaccccacccccgttaattcccttagatgcataactcaagccagagcttggaaggagctttcacctccttctgtttactcaacacctaccacatccaattagtcaccaaactctacattcttcctcctgaaaaatgccctgactctcatgcttaccttcttcccacatcattcatctttccctggtatttttctgtagtgacccagggtcactacaggaacttcttcagtgctctccgcttcttgggtttggctcccacgctaacccatcttccatacttcattttcatgtcaatctcatgatgcattcccctgcctcaaagtttttaatcggtccaaattgttttctagatacacttcaaactcctcagctggacatactggcctttgtttctggatcaagtcacctaggctgaggcctgagaatcagtattctttaaacttcccctgtgatttcagttcaagcagcttggctcttcaggggcccccaaaatgggcactgtggaaatactggtctgcttggaaccaacactaggtcaccaggccagttagagctggaaacttccctaagctacagccaaaaattttctagtacagtgtggttattttaggaataatttaaagagcatttcaccaaagagcagcatttttgcaagtatagattaaaagatcatttccatttaggaagcctaatttaattaagtcacacaatttttgaggtatgaaggcttttcttgctgagtcaggattttttgcttctctgctaatgcaaagcaggtagttgaaactgaagatttgctctgggacaatactatttacatgcctggccacattaaaggtcagggtagaaagtactgttctgtgggacagaggggcaagagggtattttgtttcaatcttattagagcactatgttaaactgtttttttcaagtagaatgtttaaattttaggttctttatgaaaaaatgcttaaaagctatttaatgatttgtgtttcttataggcaaggtattcataaatatcaaaccattaagaaaaagaaaaagatttttgagcagttagatgtttccattcaattaatggtgaggttttcagaaaaagtacttttgtgaaactgaaaaggatattgcaataatagcattttattttctattttatctttcactcatcttaaagtagtttgatggattaaaactctgtaattttcataccatgtaatgtgagctcctagtatggctactaatattgttaatatcacttctgaaaaatagagagattagcttttaaaacagctttggttgcttttctttctcttttttcctctagtttgtaattaccacaaagactgtctctgtcttattcatactgtgtccccgtgcgtgggtgatggcaggcccagggtacacatcttctgagctaatgcctgcatgatgaagaatggaattttgtataacaggcctctctgagaaggtatatgggaaggagaaatttgatccttgacctagaggaagcttatagtagtggaaaatactttttcctagcctgtctgagttttcaaagtattgtgctattgatatggcatcaatgactggaggaactgcagggtgcttggtcttgcgccagtttagataaaactacacagacacacgtgggatggttttaaggagccgagagtttgttaggcaagaaagaaggaagaagaaaatagctcccccgtacagagacagagggaagggggatttgaacaaagagaaaccccaagtgcggcagaaaagtggttgcttatgttgggatgctggaggaggcggtgtctggtttgcatagggcccagtggattggtttggtttgactaggtgtgtcatttacgtaacactgatcttcatcaaagtcttatctaattcaagggatctccaagctgcctttttacagtactattttcagtttgttgaatggttatttcttaaaatataagatgtaagtattaacagtatagatagatgggtggataatgttgtctggtcatagaagtgtcatagaaaaaaaataaagaaggtttaaggggtgagtgagtgggggggatggggggctgcttcttcagtcatgcttgctgaaggttgtttctccaaggaggtaacccttgagctgtgaagagagagctacagaactacagctgggggaagagcatttcagaaacagagaacaggctttaaagggcttgaggtggacagcaagcttggtgtgtttatttaaaaagcaaggcaaaaaataaaataaaataaaattttaagaagccagttggtcattgtgcctggagggcagtgaacaaggagaggcctgtgagtggtctcagagagctagtcttagagcaaagggaatttcctctccgccctctgaagtttccataactgagtctgctgtcatcaactgacagtagaccaattaactggagaaaaggcaaataaagttattacctgtgtgggggcacacagtactcacaggaaagtgagtacccaataactcaatgagatttagaaatgcatgtacccttcttcatttgaaagagggaactgggggctgtaggcacatttagaggaaaagtaaatggtttttaggggagaccaatggacaggaggaacagacaatagactgagacaaagttcctgtaggccgggtgtgaatgtcaactctggtctttcctgggagttaatcttccttgtttgatgagattatatgctttgggaggccaaggtggacagatcatttgaggtcaggagttcaagaccagcctggccaaaatggtgaaaccctatctctactgaaaatgcaaaaattaggcaggcatggtcacacgtgcctgtaatcccagctactcgggaggctgaggcaggagaatcacttgaacctgggaggcagaggttgcagtgagccgagatcacgccactgcactccagcctgggtgacagagtgagtgagactccgtctcaaaaaataaaaaattagagaaactttttgaaaagagattatagagagggagctcaagacaattgcattgcttctggaggaaattccctcagtcagacaagggaacttcagggaaagcccctcccctcacttaggaagaggcagaggggtgagaaatggagacaggagagggcaaaagagacctggtttctgaggctgcttctttagttcaaagtacgcagatgtcaaagagccatactttggggtattattttatgagcctcaacattagccaggggccagatttttcaggggcttgaaaactgtggtcaggactttggcttttattttgagtgaggcagggaaccactggagagttttgagcaccggagtgacatgatctgccagattttaaaagaccactgagactgtaggggaatgaggggacatgaggcagatgaggaggcccctgctgcagatctggcaagggcagatgtggcgtagactaaggtggaggggttagagatgacaaggagtgggcatgctctgaatttatttgaaaggtagagctgacaggatgcactaactggatatgacagatgggcagtgtggtgggagagactgatgaagtcaagtatgactttaggttttgatggcaccactcatagagatggggaacgtagattcaggcaagcaagtggaagaaagagttgagcttggaactgttggctgtgagatgcccggatagacacccaagtgcagatatagagaaagcagtggaatagatgcatctgagttcaaggcagaggttgggactagagacataatttgtagttgttcacacataattgatactagatcagatcacctagggagtgagtggagacagggaaggggtccaagggccaaactcaaggcattccaatctagtcaagaagatgaaaaaaacctagcaagggagactgaggaggtgatgctaggaggcaagaagtatgcaaacaacaagtgtggcgttttgtagtgccacgagaagaaatgctccttaggaagaggccattatcagctgtttcaagttctattgtaaaatgaagatggcaagtgatcagatttgacctcatggaggtcactggtgtccccagtgagagcagattcagctatgattcaccgtctgattacagaagttatcttatgattgcttttagtttcttagtgaaatgaggatctaagttatctgatgaaaaatgaggagggagggaaggactctggaggtttgtgaatagaggagaagctgtacatagttgtctgaggagtgaatcagctagaaaaatacagtcagatttcaaacagaactaagaactctcttgttagttaaggtcataaatttaaatgagaccagacagcaccattgtatgcttttctccagcctgttcggctgttcaggtgggtggaggaggcagagaataggatttaagctaggttggttttgctaagcaaatatgatagagagaagaggtactggggatgtattcatgaatacaaaaggagagattataattataatggaatagaagttaggtaatgaggaaagtgaagccatgaatggggtgatggacaaggaaaaggtggcaatgttaagagtcacagcaggatcagagaacttttggaatgtgttgcaggttgcaactgattggagccagcattgtgggtggtaaaataatttacaaagacagtagtaagttaaagaaagcaatgggcagcacagcagagaaggagctgtctgcaaagagacaggatctggagggaagttttacagggtggtgccggaggggctacctacagataagcttgtgctgctggggctacatgcaaagcgaggtatttgggaacaggatgttgtgtcagcaggttgttggtggttagccttctctcagaacaattgttctctccacacttggggcatcttccttgttgtttacttatcttgtcaggactccacagaatgggcatactagagagagtgaattggaaagacacaagatggtgcttgtaaacttacgacttcagcaatggttctgtattttcaatgacaaagcttaggctacagtcacagcaaaagctgctttaggagattataaaggacaagacctttgggttgaggagggttgtggaactgagaagctaggtattgggtagatcatctgtgaggatattgaagttactaagaatgatgataaagagagggaagggtaagaaaatcgtcaatgaattgtggcatgaccaggtggagagtaagtgtcataaagagggatagtggatagtataatgtcaggcacctcaaaggaactgggcagggagttagggagtaaaaagggcggtggtctggaagcagaaaggaggagcagtggtccagtaggggctgcagagctgcaaggctttgcctcaatcctgtcaaaggcaacttcaagctttccaggagccatactccttcatttgttcattactttctagattaggaaatcaccactcagcgactggggtctttgcctgaatgtatttcagaattactaagttggttgaatgcttccacaaatactgttttcatggagagcacttcatatttacattggaaaagagctggtgccatcctctccacagaaacaaggctgacagcccttaaatagctttggctatctcttggggagatcacagtttgtgggaaatcgacaacattaccatggaacataacttggaaatgatatttttctttgctcgccactgagcattttggacttgggaaacaggctaccagaagagtagttattgggaaagggcaatcaacacgtgctttccttggctcatgatttcttgccattttttccggcgttgtaatcaaacctgtaggctactgattatttactcattaagttccactttctcactcttcccatttcaaagtagtcatttaaaaaattgcccgatcgatgatttttatataggaacaacatattttttatgaaagtctttttcacaactgctaagaagctttgtcactataagctgtcacaagatggcatcacttggtagtcttcaagtctaattagttttcttgtacgcctgggtgcatttttgagctataaaataaaacttgttgaataaagtgaccttttttttatatgcagtctagcctattttggaattgtcctttacaaacatataacatgatgattgatcagatggcatttgggtctgaaattacttcttggatgtagaagagaacaaggccttgttttgaaagtttctgacttaattattttatttcaaaaaagacaagaaggcatatgcagaatttgaagggaattatagattctgccctgaccaagagaaggataagaaaatcatcaatggattgtggcatgaccaaaagcagaataaataacataaggaaggctgtagtcccatggcaggcacctcaaaggaactgggcaggaggttagcaagtggaaaggatagtggtctggaagcagaaagcagaagcaagaagtacacctattcagcctccaagaaatatatgtagccttcaggacaccctagacaagaaaaggctctcagaaagggaacaggtattgagataaataaatttgaggtggacacctactttgcatcacgacactgtgttaagacctagagatctaaacatgaaaaagggatcttctaaagcatcgagtggtctagcagaggagagagacatggaatccagtagccctgttgagttagcattatactgaaaaagagaagtgagaacagtttatcctcttgggtgagtagggagctgggatcctacaaagaacaagaatggagatatctgaactggactttgaaagatatcaagaatttaccacccattttggataggaatgggctagagggtgtcagggaaggaatttaaagatgaggcaacagcctgaataaaggattaaggtcacgaatagggtagactttgggaccctggggaagtagcaagggacagcaagaagtgatttggatccttacatatggaaaagactctgagtttcctggcaccctacctttgacagatttaggatgaataaaaagatgtacatgtgtttccaagatgttacagagaacactcatatttatttgatacttacatactccaagatattcagaaatcagattattgtactgaaataatgcagaattggaccatttttctatgacaagtctaaataatttatctggtggatgttttcataaaggaaggttttacacctgttcagtgtgtggtttatccaaatacctttacttcggaatttgtgcttgaaaatagattctgtatcttttggcgaatgggagccaagggttatagtggtgagtatgaagggagatgagatagggtagaaaaagaagcagctgtagagaaaatgtagtgtagaagcagatagtataggaaaaaaagatttgagctgagaggagggtttatttcctggtgtgaccagttaggagctactcgaccttagactaaagtcccttgacctcctggagtctgatgccttccgccatgtagagggaggtgatgagctattctgaggctcataagatacaacgtgtgaggcatgagagagccccttttgtgtgccataaaactctgtagaaatgggagctgatagtcctgatatcttggtatactttgagaatttagctttgttacaacttcagggtcacgggttgtgggatgaatggctcactgaatgcttctcaagcttttgggatacaggaacatgtctcacctggtacgcttgtaaaaacatcaaatattgggaaccatctccagaattcctaatttaatgtgattaggacagaatttaagaatctgcattttgagcagacatctcatgagttgcgaagacagtggaccgaggagaccattttcttgtagaaactgtcctaaaagatcttaaaagttatgtgcatccagtaaaatcaggccagaagttgcccagcctattaataaaaccttggactcaccttctgagaaaaaatgcaggcaccctttgctaggcttctgaaggtcctctttgacaggcaccccagctgagattggccttgttctcctgcaccaaataaaggagttgctagcatttttgaactcctatgttgtgcttgtgggggaggatccaagaacagattaccctgcttgctgctagcagaaacccaaacccactgcagtctcccatcacattgaccattcatttgtcagcagtgcccctgggtgggaatcaggctgacagccttccaaaacctcccctcctgtccctgcttcccccacacccctgcctcaagggacatctgtgatgcactggaaggtgacctaaacatttggccagaaccctaattctgatacttctggttctgtgacccccattaattcccttactttccaaacctccaattcctcacctgtgaatgaggaaggtgcacctgggctgcagcattgctgtgaagatgaagcaagtgcttgaggctctgtgagatcctgctgtgtggggtctgctgtccagatcatgaagaactcttgcccctcaggaacttgtatgtagatgctcttctgagcaacaacagtgaatttggaaatcctgcctaggaatcagagcaagggtccaagttgtaggcatggagttgaaagtaaaaaccagcattttaatttttactacaagataattagcttctgaataaagatagtaattttgtattgaaacatttaattccccttcttccaaagttcctactgaaatgactaatacacacacacacacacacacacacacacacacacacacacacacacacaaaacatacccatacactgtaccagaactggagcagggaagagtgaaatctactcattcattcagcaacatgcaaaacacatacacctttaagttgccagattctcaatggattcattttatatggctaagactgttacatgttcaacagtaggggaacagctaaataaataaaaaaccgagttgtccttaaagatgatggtgtataagcatcattatttacatataaaaagtattgttacactaagaagattaaaaaacaatatatacaatattatattacaaccatgcttagaaaaacctttaaaaggatatgcaccaaaatttttgacagtcattttctgtaaatgatagggatagttcaccttttaaaatattgcttatctattctgtctagtttaattactttgaatttaacatacttgcgtaataaacacatatgtctgacaggttgtaaaaattggggcttttagacttcagctgcagacctaaaatatttgcatagctaattaggggctcttgtgtgatgtccatctttatgtcaagagagtagtacgttcaagagtagtatgtcaagagaggcacggtggctcatacctgtaatcccagcattttgggagactgaggtgggtggatccacgatgtcaggagatcgatatcatcctggctaacatggtgaaaccccatctctactgaaaatacaaaaaaattagccgggcgtggtggcgggtgcctgtagtcccagctactcgggaggctgaggcaggagaatggcgtgaacccgggagcttgccctgagccgagatcgcgccactgtactttagctggggcgacagagcgagactccatctcaaaaaaaaaaaaaaaaaaaaaaaaagagtagtgacttccattatttggcacattgacctcattatattgaaatgtcttgagagtctttcactctccagtgggtcacctaagaaatgctttgggaataacaaagaggtctgtctcctccaggagatgatactgctctcttcctcctctgctctctgtgtatttttttttccttcccagctattcacacaccagtagaatttctcttatgtaagtggacctctcttgagactctgtgatggaaaagaatgtattcagttttttcccccttttttgaaaaagcatcattacaattcccgcttcccatccattcattttcataactgagtctagagtgatttcttttttctttgaactttacttgaatgtatcccgtccctttcataagagccacttttacctgggagcctcagaaggttagagtgatgatatggaggtgctgccttattaatcaaacgtttgctctgtgctgggcattaatcacttaaagctgcacagctggataagattcattagtgtcttctttcactgtgctcgtctccccgccccgcttgctcttggaggcatttactaaaatgccaccagtgcttccatcaccagctccatctctctcccacctcccgtggccacgtgctgtgtttggcccctgggtacagagaaagatcactaagaggttaccaaacagaacattaaagggcctctgatggcttctttgactgattcctttcaaatctgcctggatcctctggaagcctcttctcaggatgcatgttccacactgagcccagtggctgccctcaggagtagatgcaggcctcagagatgctgaacacctccctggcatgggtttgcgtgggatgcacctgttcatcagtcatgccccctccgtctggggacatcctgctggtgcccagaccatcctccctgcttcctgcttccttgccagatccttctctaatccacttcctgacttccacatagaggtctttgacttcagagtcccttgctttggcctttaaaccccccttcatttaatcattcttcagtaaacatctattgagtgcctgctgtatgccaggctctgcagcagtcactggggacgtaattctgtgccagagaaacatggttctgacctcatggaagtttctagcagagaagacatgtaaaagcaaaacagaagagtaaacaaagcaacgtggtctcaagcgtaagaagtgctgtgaagtcaacaaaaagaaacagagacagaatctactaggagtgggcaccatattttgaatggcgtggccagagaagactgtggtccttggaccaacaccaacagcattgcctgagaacctgctagaaatgcagattctcagaccctatcccagacccacttcagtctgattcatcagagactcccccagcagtctgtgtttaatgagccctccaggtggttccagtggccaccctagattgagaaccactgattaaggctacgtgatgggaaggaggtaggtatgtgaagtgtggaggaaagcaccttccaggctgagggtccagatgagcaaaaacaggagagagcttggcttttttgaggaactgaaaccaagaccattttggccggagccaagtgttggtgatgtgggcagggattaaatcagataggctcttgcagaccaaagtgaagggataggattttaacctagttaagaagcccttgaagcatcttaagcaatgccttgcactgatctggactcccttttaagatgatctctattgctgagtccagaatagattggagtggcttaagaatggaagtgggagaccaggaaggaggctgatacacaggtccaagcagtaaatggaggtggcctggaccaaggtggcaacagtaggaataaggtaagaaggtacttgtgagatatgttttagaaataagctcaaaaagacttgtggactgattaggtgtggacaggggtagtggtggagagggggaatcatgattgacttcctggtgtctggcttcagtaactgggtagatggatgggtcatttactgctccagagaggcaagaagcagacacgccctctcggccttcctctcagacactccgtaacatggtgggtctgaaatcccactgtaaacagcttcatggagtgcatcctcagcttgtcttcatgggccagtcctcagttcagcccagacccctgagccctcatggagatgaaggagccattgcttcgatctccataagggctctgtccctctagcgcaatgtcttgtgtgcagtgaacatttgagaaatacctaaatgactcggtctgctggaagagcagtattcctgtcagaaaaatattgagtcagtccccagccttgattaaagatgtataattgttaccttcaccttaggaaggacaaaagagataaattgcctggcgccatgaaacacagacagcccaaggggttgaaccaaagacagaagcagaagataggagtggccaggggcccaggagaaaataggagaaacctgtggcttggtggtgagtgaccctttgcccagtcacccactgtgaagagtgaactgcaggaggaaatgggaaggaaaacagatcttttgactctgctcatctcctgcagagaaggtgggctggttacataaaaagctactgtgggctgctcagttcctgagtcttgctcacagggctgaaggaaacattccctctgtctctcacagatgttaataatgagcatgccagtcaatccacccagtcaggagtcgctcatctccagctgtcccgggcaccttgttgatggtgggtcttgcatagtacattgtttcttgttttctgtgtctgtttaggatatacagggagctgtatcttctagatttaaatgctgaaaaaaagtggtgagtgagaaggggagaatggaaatgagatgtataggagcatggggcgaacacagcacgagggaactccaaccgaaagagccataacctaaatctgagaagctaattttgcagaaccagcttagccacgggactttggggatttgctttggaaagatgtttgcattgtctgtgtcattggcatgaggccacacagtagttctcaaatgggaggagggatttcgcaatgtctggagatagttttgtttgtcacatctgggtggggtggtggaggagggcactggtatctagtgagcagaggccagagatatgctgctaaacattctacagtgaacaggaaggatttgccatggggatgaggggagttggcaatgtctggagatagttttgtcacatttggttgggggtggggggccactgacacctagtgaatagaggccagagatgctgctaaacattctgtaatgcacaggacaggcttccacaacatagaattatctggcccaaatgtcagtagtgccaaggttgaagaaccctggcctagaccgagtgaagaggacagagcaagagaacctggtctgatgtctgccaccgagagagggtgtggccatgcacattgagaagggggctcttcagctggtctgtcatcaaaggaaccagatgagaaaattccgtgaagtcccacctgtcttttcagctcttgtgtgagtctccgtgaaaatcagcagatatttatatcctccatttgtggccaaggcacaaggcaagggaatgtgggggaaacacagtggaataagaagtggtgccgtttccagttcagtgatagggtctctcatcatgcaaggcagatggaagtaagtacctctaccatagggtaaaaaagtgttatgagatctttgaagagtgagtgagcaggccaggcatggtggctcacgcttgtaatgccagcagtttgggaggccaaggcgggtggatcacctgaggtcaggagttcaagaccagcctgaccaacatggtgaaaccccttctctactaaaaatacaaaaattagctgggcgtagtggcaggcacctataatcccagctactcgggaagctgaggcaggagaatcgcttgaacctgggagacagaggttgcagtgagccaagatcgtaccattgcactccagcctgagtgacagagcgagactccatttcaaaaacaaacaaacaaaaagagtgagtgagcagtaccttctatagggagcatatcctagaggctctgccgtatggtgggaaaatgttcaaatcccttttgcgtcttgatgtatataggaaggtggttaagagcatggatttaggaacagtgagaactgggtttgtatcctagccctcagtttccttcttcataggaaggagatagttgtagggttatagtgaagaaaaaaatgagataatctaaaatggttcaaatagcacctggcacacagtcaagaggtcaataaatggtagagactgttgtggtatggaggaagttactgctctgtggaggggtagtagctgtgtgattttatacagttgatttaatttttctgaacctcagtttcctaatctgtaaaagagagatgaaatgatgtgctctgtagaacctttgtaaggataaaaggacaatgtatgccaagtgcctggtgcatagatgacattctaactcaatgtgaaatcttctccttactccggactttggttgaaggagtctggtgtcttttgcacatgatgatgtcaacttgggtccctcacattgccttagcgtccttcacccaacccaccagtgcaggacatagtggtcctccccaccccgcccattgtctacccctctaaatgattttaagaaccaagtgtttgtcctcttaagtacttataaacttctctaagataaatattttatataaaatcaagtacctcttgatcctagttatgtttttcaccacttatctattcaaactacacttattgagcatcttctgcatgctaggaaccgacataggagttggggataataagtcaaagaacgcacaataactcacttgactgtgtctatgatagacaagtgtttgcctagcttatgtcacttgaactcgaccttcattaattttgccatattattcagttaaataaacctgggctacatcctgaaggaggaaagagagtcagccaggaaaagaatcctcagggcctaggtggttgtggggaggtgatgggacattccaggcagagggagtggcctcttgggtggaggccagaagagagaaggatgcttctaggtcactggtcagagtttgaggaggaaaggagcaagaaatgcagcaggtgaggtgagccaggtcagcttaggaagggcctcgtataaattgctgtggagttcagactttgacccaaggttattgaagaccacagaaatattttaggctaaggaaagacatgatcagatctgtgctttggaaagaaaactctttggactgaaaagattaggaggccaacgcctgatccaagcaggagataaacacctgatcaacgtcatggcccagattgggaatgtggtcagtacgtgtttaagatgtgggatcaacaggtttgggtggttgataggttgtgatggagagtgagttggaaaatgagaaactggggatgatttattggtgggcaatagtacctgcaattgagatagagaatgtgagaataagagcacaccaggaatatgggagagatgagctcagtggatgaactagatgtgaagtgctttgggcacatccaaatggagatactgtcctgctcaaagctagaaagtgaattaatacagaaacaaaatcaaataccgcatgttcacccttataagtgagagctaaacattgggtacacagggacataagagtggaaacagtagacactggggactcccaaagcagagagggagcagggcaaggttggaaaaactacctattgggtactgtgctcactatttgggtgacgggttcaatagaagtccaaacctcagcattgtgcagtatatccatgtagcaaacctgcacgtgtacccccaaatctaaaataatttttaaaaaataacaaaaagataaattgacaattaaaaaataaattaattcattgtgattatttttaaattttgctgaagagcctatagaggaaaggtgagtgagatgggctggagaaattggagtcacaagaattagataaaactgttaagtcatttgaatagatgatctcaccgaggaagaaggtggggagtgagaagagaagaagggaccaggactgtgcatctgcatttaagagacaggcaggagaagatgaactcccaaaagactgaagaggataatcagagaagtagaagagatgactattttcagtgaaaaatggaggatcttgatggttttagaagaaagtgggtttttagggagagcccccaacccctcatccttaccacagataacaatagtcctttggaaggcacggagcaacacaaacacagaggtggttgcggaacatgccattctcattttaactaagggtggctttgaagattaaattacaaagaagcagttgggagaattccagttttgggtcttgacaactctttgtcttcatagcatagcatgagggtccagtggccacttgggcaacagatgcacttaccctgtaaccatgaataccactcattctctcacttactgggaggggactgtagtcctcatagctgcccccagtctccctttctagtgatggaaatttcctttattgacagggaaacagcaggctaatggcacagatgaaatgtaaattttgacagccccgacaggtaaatattggctttgcacaaacaagtttctataaataacctgtctgctgcagaaacgccacagatggcagcagggctgcccaagtgttgatttttcccagggtgcttggtgcagaaaagcacagctgtcagctttgctgttcctgttcccagctcaggctacctctgctgtgcctgcagactgtccacgtcccatcctcctttggcaggagaggcagggacaggtggagatcagtcatttcaataacctacctccgatgcctttcattccaggattccaaaggagtttcttaaaaatgtcacttccttgggttctacagtccaaagtgggaatctgtctgatctggggatgtgttcgccccttttaattaaagttggtccagttgaaaagaaaattggatggagtgagatacagtcactctagactgtgtgccacatggccctgttgctaaaaatagtaccgtcaaggactctgggcagtatgtcaggctattatgttagcaggcatggactctgacttaaggggaatgtgaggggtatggagccacagcaagtcatctcactggggaaatttgcccgatttaaccccatccagggagctaagggaaacacagtgagccactattggaaaaacagaggcattcttatttttcaactatgcaactaagagcccataactctaataaagctgattgaggtaatgacattctaaatgatcgttctagggattcccggaaagcttcgtgctaagttaaatgcccgtcactgaggctgggctccggtttggggtatgcctgtacctccctccttccctccctaatgtttattttctgctccaacttctttccttaggctcattgacttagtgcatttgtattgtaagccctttcaaaacccttgtgaaagtagaaaaggaagaaaccatataaaagtgagtcagaggattctagaaggtacctaagatagcaatagtaacttaaaaacttattttatatcctacaaaggctttgagaaaatgtatgacaataatggaccttgtgcaattaaacaatcataattgaaaattaggaagaaaacaatgttgagaactggaataggaaatcacctgtgaataatgaagtaatgatggtaccacacccagagcaaacttgtggcgttttctttagccttatccccggagagtagagcaaagctgccgtgagtcagcaggcgttggaaaggacagcaaatacacttgctattgccctgggttcgcagagtgaattcaggaccctttattcccacttcaaggcaaccagtcactgctagcataggctcctttgcttttctggtggggcagccccttctagctctaattctacattaagaaggtgtactagtgttttagagctttgggccttttctcccaaatcttgtctccatgtatgagggcctatgttttcactaagggctgggaacacttcctaggctgggctacatccactccattgtgcttcccaattactttctatacaactggcttccagcaggcaacaaatcaatgtctgtgaagtcccgttgacttcaaggagctccggtcatcagagaaactgatctcctcattggggaagagaccagtgacatgcttcatgagtaaaattacagcttgatattcaccagtagaacttagcaagatgctcagcagagaaaataatgaatcatcttttgctaagcctgtgagaaggatagaaaatattatacgggaggtcccaggagtagagtgaaaatcatgtgggctttgaaatcaagcagactttagtttgaatcgtgcactccttcgtgtgagctggtggactttggtcaagtttgagtctctttgaatctcaacttctccattttaaaaatacagatggtgataattggattctcaggattgtcgtgcccaagaagcagcctagtgtcaggtggcaagcagggattctggagccacattgccaagttcagattcctgctctgacatttactagctgagtcatctgcagcaaattacttagcctttctatgttcatgtccttatgtttaaaatagggaaagttgccatgaggaatagttaatctatgtaacgttctaagatcactgtgaagcacataagagctgcatgtgttcttgtggcaataccaggtggcattgagcagagatgccccacctgtggtactccccacctccatcttgctctcttactctccctgttcttttcttgatcatttttatgtttcctgatcattttttaaatgtgaaaccagccctattgttgtgattttcctaaaggattgtgcagaccctgtctagtgtatatccaccctcagagcagaagttagcatgactttcatggaaagccaggaagggagctctcgaggaaaaagatgagtgttgttattcagaactggggttaaggtttcatttcctttttgttatgaaaatatgttctgcaattgaaaacaaaagtgcaaagcgttctgaaaactaaaagtaatatacatgtttcttgagtaaggagtgaatgaactatttagaggcatataatacacttcacttattcgaagcattaaatattccagttactcattcattcaaactttcttacgtagcagttgtacatggttctatgccagattctggggatagaaataggaacaggacagtccttatcccccaaaactccaatcaaattgtctatgaatgaaattggtgatcaagcagttgaacaaagagcctctcatgactgaagatctaaaatgccaacagagagcacagagacaaggagaggccagtggcccttttgttaggatgagtgtggcagcttagctgaggcagagcttacaaaaggtaggggaaagggaagactggatttatataaacaccgtgttactctgaattttttacgcataaaagaaaaggtattgttgacagtcacagaactgcataaccatagtagataagggatactgaacgtacacagtggaaggactttaatgaatgtgtcgcctgctcatttgcatgttcacccacctcgacccgctgcagtggccagcgttgtccccagtgtacagatgtgggaactggagctcaaagggaatgaggcagtagccctcaccatgagcacctctgaggtaggacccaggttccgcaggtagtctgtgtcacactgaactgtcccacatgccagcctgccgtgaccatgatctgaaggtggctggtcatggtgatttttgctgcatgagaattctggaagctgtcagtggcgtgctgtcaggactgcctttttccttccagatccttggacatcttttcttctctttcctgcgagcatcttatcagttactgagaaaggcctttctgtactgtgtattcattttcttgggaagtgttcattataagtgtagattttttacagagcctaaaaaatttcctggctagggcactaaatctaattagcatgcaaagctgtgtatgatctcatgttatcattccttcaagccagaacacagtgaacccaccatcaaagcaagtgctttcttaaaggtaaactatgccatttgtccagatttattccctctccatgcaaatctatggtttttatgtgactaaagataatctgttgtctacgccaaagaaaacgtcctcttcatttccctcctgaaatccccatccatgtcataagcctcctcagagggtggcagcacccacctgtctcctgagacagagaaaatgttgcttttaagcctcactacaatttgagggttgtcacttgtaattactttatatttctattttaagcattgttgacatgctctggtaaatcattttgtttttctagatatagctgagggatcttagaagtaagtaatgtgcagctgcgcttcctgatagaagaggaaagacgttctagatatggcagagagggggatgcctccttagtgagtcagggttgggtgcctcccagtggcctttactattctttgatccacatccgccaggttgtgaagcagctacctggaggtctggactgacaggggagtgctttggactattgtaccttgaaaaaaattgtctgtgtatagccattggtgaaatgatgattgtatagtccattggttttatgtaaattacaaattaatgttaacctctacctctaaaactcttgctccctggaaatcattcagcacgaagctaaggtgatgctagcttactaacacgatttcaaatccaaggcacctggggtggagtaagcagaaaggcttaggaagcagaattcaagtcctgccacttcccaggtgtgtgatctgaggcaaattgatttacatctctgagcatcagtttgctcatctgtgaaaccagaggaatgaggcccccctctcaggatgttttgtagagtgaatgcagtatcttccaaatggagaagatgagttcaatcctttgaaagtacatgtttggccatttgcccaggactggtcacaagactgaagccatggaacttcttcctagagatccaaattattaggtttggcattctattctaatggccctttagcaatgccatgtcaaatgctcaaagtgacaatttctaaagggaactgagaaattcataggtgttatgctaggagataaaaggcctcacatgaccaaatgtttgtgaaatgctaggtttaagaaggtgaacagatttaacttgtagatgttaatatgtttgtagataagagatggagtttctcaaaacattacatcatagaatcctttcctttatctcatactccctttctttcttctgccccacccaacacatcgtggaacctgtgtaacccagagcttactctgaaaaacactgatctaaggaattccaaagttagtgttctcagctcttgacacctgtgctagcagaaaggcacattgtcgtagataatgcaaataccaaacactatataaaaagcaaatctgtgacttctgaatataccttatagtaagtgaaggtgattgattcgagcactaggcttttattctacatgttttttatttagctgaaatttcagaaatcaatttattcttttagagccaatctggataagaagtgatggaatttatccaaagaatgtaatacataattggaaacaaacttggaatttcatttacattatttaggcatatttcataaaatgcagagctgagagccgatgctatctccttcatgaaccttctctagatttcccagctataagttatcttttccttctccagaccagttatcacactatctgtgcctctcttgtgcatttataactttcctaactatataaatcttcctttataactgtcgctgttaatgcaagagctaattgtgtgcatggcttgtctcccctgctgatgaagaaactcttgttgtagagtcccccagtgcctagcagagagcctgcacatgctagacactcaaatgtttgacttggtgagagtttcttttatttccctaagattgttaatttgtcattattattgttactaatagttgtcaattaactaatatttcatgaacatctatgtgctaggcaatttgcattgattactatactcaatattcacaacagaactctgaagtagatacatgtcccctccaaaaagaaactgaggctttaagaatttataagtatcttgcccagtatcagaactaatattctaaactacaattgtatcttgcccaagcctgtgctttaaatcactaaattaccctcttaagggctaaagaatatacaaatacctgcaacccaaaagggcagcctcagaggagctttggtagttccctattctccttaagtcccactgtagaaataatcacccctaggaatgaaagacttgaatactactactcacttgctttctcacatacagtgtgagtgtagaaggctctccttggcctattctatctaaggttgctttcaccagatttgccccagtgtgactgtaagcccttgttaagcttgggttaattgccaatttaggcaaggttctcatttagaaagtcccttcagggaaagcagcctcagaactaggagatggttgtctatttactcttcactcacccagctgctaatggggttaggggaatggcaacaacatatgccactccagattcttcccgtttacaaagtcttgatcatttccacacccaaaatcctgtcaattgccacctgtggagtcaggcaataaaaccaaccagtatttattgagcacacgtcacatgtaaggataaggtgtgtgttatgaattcattcatactggtttgcttttgccaggagcatacagtgttgtgaagaataaaacaggaaatttgttttcttattgtgggtcagatgccactccacgcatgcctccggccagccacttggcccctctgcctcccagatccctgagcagtgaaagcaggagggtgggcttttgcaattcctgctctctccttgtcggcctggctttctgagagtggggcaccccccgccatcccagggaaagggttgatctgcactttgaacatgggaacccttgtctatatgtggcatggtccagagccacagcaatgcttcccatgtattctgttcaccacttcatctctgagaatattttaaaaatgtagttcttggttaagtgagctgaatcaaaacatatccaagttggaataggatctactctgtgtagacttgctggaagtgaaacacacagagcctgcgggaagagttgttctatgagtacttgagcccccagcctgactaggttaagtcttctatgagtacatgaacccctagcctgactaggttaagtcttctatgagtacatgaacccctagcctgactaggttaagtcttctatgagtacttgagcccccagcctgactaggttaagtcttctatgagtacttgagcccccagcctgactaggttaagtcttggagcagatcttagactctgtcttcggtaagtggccaagtctttggcctttgtatgctgtggctaggagataaaaaaaaaaaaactcatttcttaaatgtgttaaaatacagttatgtccatagtactttaggggttagtctctatttgtattagcttaaacaattttgcaggtaaatacatgttcattttttttttaattagcaatgtctatagctttgtttttaagagacaaggtcttgctctgtcacccaggctggagtgcagttgtacgattatagctcactgcagcctggaactccctggctcaaacaatcctcccacctcagcctcccgagtacttaggactacaggcatgcaccaccatgcccagctaatctttgatgtttaaatcaattgaattttttgaaaattgacgtcactgaacaaaatagacaaaaaaatctctctcatggaccttacattctaggtagccattgatgacaactaaaatagagaaataggattttcccatccaagaacacagtatccaaaatgaagaaactgtaataaaggccctcttagctcatgcatcaggagttggcagctgattagttaattaaaaagttgatgacagtggttatggttaatcataatatgatatatgcataccttaaatattttattttaacttaaaacatacaaatgcatgttaaatcaccaactttttaatgtgagactcaagctttttcttaaatttgcagattggagtttctaattaccattcttagataaaccatgccaaaaagacatcatctgtgatttccagtttcagttttcttaaagtggaacaagctctgaagacacttttgaagttatctaagtacaatctcttccagttttctgtggttgacccacccacatgtggttcaacagcaggtttggcttggtttcagcaacttgtttttatccagtctttcaaagcattcaacttggagctttttctactcatatttcatcagtgtatataatatgcaatcaaattacataattacaatgacaactataactggaagaaacacatttggagacaaagatccctaaatctcacatctcagctggtgggagcagaaacccaggggcattccagcatcttgactgtgagcttggagtgtcagcctgggcagcagtcagtatattttagaaaaaggatggaggatgtttcataaactggcaagtctgttatggtggccgtcttttaagaggactcctactgtactcctggatgcgaccataagcagacattatttgcagcttctagaatagtgtttctcagcctgagttctgtggcacctggcagttccatgagtggcctcaggggccactagagagtgttagcagcaagtctgaatccctccagcttccttcagctgtaggagctccacttttgttttatacctctcactgttgcatttaattttattcaaataaaaagactgagcaaaccattattatttttaaacaacgggtattgtggtgcttttagggaggaaatcttagactattagcagtagcatacactattgtcaatagaggacatctgataacagtctgaaatcctttaaagagacaagggattttaaatgtctggtttacacttgattttcttccattacatgtttctgaataagcactgtgttcattgcttagggctgctgtaacaaagtactaccaatgaggagccttcagacaacaggaaattatggtctcatagttttggaggctatgagaaagttatggtctcctagttttggagcatggctcacagggccttgctctgtctgaaatctgcaggggaatctctccttgcctttcacaggtttctgttgaattgctggccatccttggcatttcctcgcttgcagctgcatcacttcagtctctgcctttgttgtcacgtggcgttctccctgtgtgactgtcttcatattgccatcttcttataaggacgccagttatactggactaggggccaactctgctccagtatgactgcatcgtaactaattacatctgcaatggcactgtttccaaatagtgtcacattctgaggtactggtgtgaggacttcagcatatcttttggggggagcaaaattaaaaccataaccggtgctaaagatttgttgaatatagttctttcccctgcccctagagactgccaaaaataaaacaaagcctcccaacatttaaaatgccagtgatgtccctgtgcccgaataaaactgaagtagatccctgggagaaccccctaattgaggtgaagcagtgtggcccaaaaaagaaactacaataaaaggaaataccatattttcagtgcttactctatacttaatcctgtgttaagcacattctttttttaatgtatcttccccaaaatcctaacagatatctttagcttttcatatgctttcatttgtaagcaacagaaaaccaaacattaatggtctttaagaagaaaatgggccagattcggtggcttacacctataatctcaacactttcggaagccaagaaggaaaaatggcttgaggccaggagtttgagaccatcccaggtaacatagaccccatctctacaaaaaatacaaaaattagccaggcatgatggtgcacacctgtagtcccagctccttggaagactgaggcaggaggatcacttcagactgggaggtggaggctgcagtgagccatgattgcaccatggcactccagtctgggcaacagagcgagacccccatctctaaaaaataaaactaaaaaatcgagagaagaaaatgtgttggctctttaactagaagccagactaaggtagaattcagggccagcgtaatccaggggtggtagcccatttccccatgattccctgggctcttccctcctctgtgtggcagctttattgctcagtggctagtaagggggtggcagtagtgagggacatttgcacaccacatcatcccatggaagagacaggggtctcttcagaatgtgatcccagaaggatggaaaataattacagaaacactgaatccaccctctgcttggtccttggcttgaatttgtgcccacttctatttctgaaccaaatactgtcacagtaaaaggagttgcactcagaccaatcagggctacctctggaggtgggtggggtggtcagcattcactcaggtgctagggctgcctggagggtgagtggacacctgaataaaacagggtcctcttaggaaggaggagggggcaatcttaggtaagcaaccaacagtatgcactgcagcaggcccagggtacagatgaaatcactcagatttagggagtcgctcacttctttccaaaatcacacagcttgtaagtgttagatgaacattcaagaccaaatggctttgactttttcttgtctagcataccaccacctattctcttactggaggggccagccattttcctaggctttttggagtagtagtgtagtcttagcttattagaaatggccttcaaaaccctcagctgtgcaccttatagtaagagcattaagagcctcaaaatgtgtgtgcccctttgaatgaaaaacgctgttgtggtgtcattgagtgttgagagagaattctgggggtgcctgtgctgggagaatgccccacctgaatagacagcctcagtagaaccactcactaaatggtttgcctccttttgtgccttaatgcactttgatcaagatatcagataggttgcatcatcagataaggatgtcaacaaaaaacagagctgctctcctcaactttgcaattaggccagtagagtactagtatttttttttagaagggacaaggctgttttagtcctttacgtgtggctgataaagatatatgcaagactgggcaatttacaaaagaaagaggtttaatggactcacagttccacatggctggggaggcctcaccatcatggcagaaggtgaaaggcacatctcacacagcagcagatgagaagagtaagagccaagcaaaaggggtttccccttataaaaccatctgatctcgtgagacttattcactggcgcgagaacagtatgtggggaaccgcccccatgattcaattatctcccactgggtcccttccacagcacgagggaattatgggagctacaattcaagatggggtttgggtgaggacacagccaaaccatatcaaaggcaatacccaaacagcctctcaggaaaaacttgcagtggtggagaccacggtggtcctgataatattgttcacagtaatagcaaatctcccagatggaagaaaaattttcctgtgtccctggcatctcactcaagtgatgagaaatgaagaacaagcttcctcggcttagaccttggggacaacctgggtcattggctgtaacctggagttgaactccttctgtgcatttttctttagaatttctctggcccttagctatttaaagctttctctagtgtcaccagaggaggattacaaaatccaagagtttttcaaggacattttgtttagtgagcatctgacttcttgtcaaggagaaaaaaactattttgcccattattaaccttcatgctaattgtttcttttttcatctcctaatcatcaaaagcgcatgtttgcatttccatttcaattatttgcatccaaagcagaaacagtcccaatgttattaacttttataatgcccaaaagtacacagctgtgagccctacctagccatgcctgagggttcccatttccctgggaaggcactctcagcaggtttggtctccgagctatgtgccgggagaggggactagagtgtggatgctgcgaagcccagcgctcttccctccgtgcagagctgccaaagcaaaggcagatgttgtcagcccttgcctcactttcccagatccactacccaggctgctgtcttgcctgagccttttaagaaagcgttgcagcagcctctctcattgtcttggttgggggaagggctgagttaaattggccaggcatgtgacttgtcatccgcgttgccctagttcgccacagtccgtttcttgctatcatggcccaatctctgcaagaacttactctcccttgcaaattccctccaaacctgtgacttaccctcaacccagccctcttggcttcattcccagaggggtctctccaaccccagaagccacccaaagctgctgggatcctgctgggagagcctgtatcagcacatttcagacctttccataccaaaccctttttcaaaacaaaacaaaaaaggcttagcggaaactcagtaaataattgctgtacagcagagctgttgtcattcagatgggaggggcaacttgaagtcctgccccttgatactccgaggtgagccctgcctcttttgaacattgaagatcacagacctgaagtcacaagcctgcagccatgaagcctcaggcccgctgcctttctggcaggtgcctcagtgctacctgcctctgcattctcctctccaacttctgcctgctctgccagattccccaaaactccctgagttgtcatgtgtctggaagaatcccactgggttgcccttcatcccacagagacggagcctcttagcaggaaagcgttgcacacatcctattgccctggtcctagacttctgtcctcccagcaccccacacctgtcactctagggcatccaagtgcagagagtatttcacacagagcatttaaagtgcttcttatgcaattgtgatttcacagctcacttctcaccttagaggcttagcaggaactactattcgtcttcccataccaagttccaagataagagtgcagatgtaagcccttgaggatcttcaactagaaaatgacctggactttttagataaagcgactagttcttcctgtctggggcaccttggaccaaatggattaatatccttaaaaatgccattatacactctgttcctgtattgttttagctacattgtgaagagtcctatctaagcaagcttgggatacagtgattcctcgcctgcagcctggagtctcatagtcttctcaaagcacgggtgagtgacataaagatactgtctagccccacgtgctctgagctgctttgagcagaagttaactgggccaaaaggacacctcgttgtccctctatcatggcagtgcgggattgtgattgagaatgggacagaagtgatagcttcacaacttttcagagtcagtctctacacgatctctgagccctggctgcagcaccagccctgggaaggcatccgcccactgtctctgcagcaccccagaggatctcagacatggagagcaagcatttcccactcatctgttgcctgaacaaacatctagggagctcttgctgtcccgggcactgagcttggacactcagtgatgaatggagcacacagagggtattgccagcctgacagagcaggctgaagaggtacaaggagcccgcatcttggaaacatccaagagtctaatggatattagaggcacagagagaagaatgaaatcagatctcatctttgctctgtgtctgtctcctctctgatcctctcagcctgctttttcttcagttacagaagcataagactccatagaaccttccagctttgtttcactttgttcacttagtttgtttcacttactttgcactgtattctcactgttgcccttgcccccacaagagtaagccacagtcaatccttttctgaagtacaaagacttgcatttagcagggtctgaattcaggagattttttcatccatgcatttcaagattcttaattagaagtagatggactcctaaatctaacacactttttttctccattcatgaaactggaagtgacagaagggtattcagcacattgttttcttttatcacgtatcgcccagtcctgaattgattttcatttgtctcccagttaatcagggaactccttgagagagagaaaacacagaaaactaatacttcttatgaaggaaactgagccatgtaccatgagggaacccttccctatgtgtggacaggatccatgtcttattgaacggtgtctagtagtgccttggttgcctctttccacagctatactaagtgttctgtgcatgaatgaatgaatgaatgaatgaatgaagttaactctccaaagagcagatcatcttacacctcagcatgtgttttagtatattgaatctttagtcttgtgtatagtatctggttacctgaaacaatgtattatgcagagctttctgattttcttacatatccttaaagagagaaagatatacacaaaagttcctagaacataaaatttgctcaattagtgtttaacacacacagatggttattaagagaagtctgtagctagggaataccattctccctttcgtggaggatgtatctccctccacgtgtgcccaaggttacgcagctcaagcattggatttgtgttcaggttgcatgtattcaggacatgcactccaccatgtgctgggtgtgccactgggagctggccacgtgcttataatttaatcctacagcaactctgcagagtctatattagtgtggtgattggggagatgatgaaactgaggtctgtttttttgagacggagtctcgctgtgttgccaagctggagtgcagtgatgcaatctcggctcactgcaacctccgcctcccgggttcaagagattctcacgcctcaacctccccagtagctgggattacaggcacacaccaccacccccagctaattttttgtacttttagtagagacagggtttcaccatgttggccaggctggtcttgaactcttgacctcaggtgatccacccgcctcagcttcccaaagtgctgggattacaggcgtgagccaccatgcctggcctgaaactgaggtcttaagaagagttttatttaaggccacaagttcttacaccacaggaccctattccagtagcatccattacgtcttgagcagctagtactggtcctgggagattgactctctgggataaatcccgaaaagctgccttaaatgttctaaaggaagcacattttattccacatttgtatccatccttttcattctagcatggtgcccaataagcatgatagtgaccaaagctttcatcttattaaattctgtattattttagactacatttcttaactatcaaattgacaaaaatgaatgaagtgtaataggaaagaaagaaactcttatccattctgaccgcttttgaggactgatggaggaagagataggagactgaaggtgcgcatgttctcacctcaaagttgagtctgaaaaggttcactgaatttttctgcgtgtcccctttgtgcagaaagagaggaagcatgtctttctcaccctagaaaacatgctttgaccgtttttgcccttgccttattggaaaacagctgaaattgtgagtatgacatgtttggaatgatagactttctcactaagggaggaaagcagagtcaagcttattttaaaaaatcagtgaggtgtttctaaaaacacagcattaaaaaatgatgtgcctgagcatgttctgtagaagatgattttatcctatcttagagggtatttcaattatgactactcttttgaggagcaatgcccccggaatacaggagtgagtaacagagcacagcatgtggcttgggaggcttcccactaaatgcaactcagcaaattaaaagcatatgtaattttaatgacagcctaagagaaatgaaccttcaaaggttaggaaattgtagttttcatttgagggaattgcatggagctagactttctactctttttatcttaaaaaggcacatccaaaaatattacagtatatgaacatggactaaaattcactgaatctgccatttgaaagcaagatacagcttttgaattagcctaacactggcttgctattgattttgttaacataactacattgggcccaaaaagccacctaaccatttctagacacatccagagggcataagtattccctggcaaatagtagcttgcccatgggctggggagacccgtacaccagggtagtcagttcagttgcattttatataggcaatgagctcatgactcctcagtgactggatgtgtttcccaactctctttgatttgcgttgaccagtgctcctcacagtaggggtgctacctaatgaccaacataatctctcaacataatttagggccttgtggagatgcactatttcattaggccacttggatctcatggagcagcagactattcattttctcaattgctcccgaagggatatgcagagctgatgaacctctttacttatactttgggagtaactcatggaccggacaagctctggcttgtttccaggggactcacttgggagtaatggttttcaagtgcatttgaaagccagtacaatagatttgaccatcatagacttgaatatataatatttcagtatacatcgccagctattttcacattgtggtgttacagtgagtctaagacatactctctataaaagtcatcagctgcttgacccattcattgtttattttttcaacaagtattatatgagtgctgaccattctgggctgggccacactaaacactgagctggaagaccataaagcatgcttaataaaggtttggagggtggcatgttgccccattaagaaatatttatgtgatcattttaatctcagcttagagaaattttcaatctgatgccttgatgtgtatttacctgtgtcttgatgtgcattccatcatatctaatgccttgatgtgtatttaccaatgctttggtgtgcactccatcagaaaactcagatttgagaggcaggagacttaacgggggagtgaccctagggaactaagaggaggtggcagcacttgcactttcatgtggagcttgaccccacttctatgtggatgaaagagtcagtgcagtgctggtggtgcggccagcccctggacatcaggaagtaagcctggcaggaatccataccccaatctgtagctgcctagaccaagcttaccccattagaggcagtactagagagtatggggctttggttctagcagagtctgctacttgctagccaggtgccccgagtaaaactcttaacctctctcaactgccctttcttagtaatctccactattagggcagatgcagcatgtagctcagtggctggccagataaaacttccataggtgatggttgcccatgactagtgaggtcatgctgctaccagtccctcctgtctttctggtcctttgttgtgggtgcacgtgctgtgcagctctttgtgtgtcatatgccacactttagtacattctcacctttcagaaaagctccctttcacatttaatctagtggaagaagacccctagttcctcagcaggactgtctgattccctgaggcctctcccacagccctggtgggtgggatgactgactgcactttagaccataggtaatagttacagtctggcctgggaatggggctgagagtttactcggcctgctccttcaagatgagcattgttaaccaggcagtgggaaccaaacagagcctgaaataggggttggtgttatctctctgttgcagggtgtcgctgcccctgatgcatttcttgtcagtgcttcttggatagaaggaaaaaaaacgatggtgtaatatactgttcttatcagagacttcacttttcaaatacagaatgccatttgtgtgtcactgaggctgttgtaattgccttctgcacctgatttacagttggttcttcttgactggttacactaaatgatttgcttaaagtcttattgattggatggggaagggtaagcattgccgtcaaggccctgttgagtcggtgggaaaggaggcagaaggagatttagaatgttttaaaataatcctattcttggatagaagtacaggtggcaggagacagccagctttctgttttctcatgaagagggaagatgcacttacgaatcctggcgttaatcctgaagcctcacttgaatcaaaggagtttatcttcttggttaacaagtggcaaataaataaataaataaaacttttgaatcttctttttctctcatttgccttttaggattttcagagatttactatcacccaaagacaatgctaaagcacaaagcgataaattttggatttctgaacaatcagagattgactggcatgagttattaagattaaatccaaggctggcttcccagaactgttgtgagatcaatcacctatttactgatatttgaactcccaaatctcttccccttgagcccattactgtagttaaaatgacagtccttggaattaaccaatttatttaaatatgtaaatagcccttgggcccctgtcactcattcatactctggtatgaactagttccttcaagtttgatctctagagtgatgctaaatgtatagggaaggctatgtgttttaccaaaaacaaaatagtctgggactgtctcacaaaagtaaggctgagtatggaaccactgtgtggtccccagttctgggctgccttgtgtactgtaagctttcaattctgctactctgactcttcacaagggaaaattatagcttacttcttggtgttagtgtgagaatcagcctaggtaaactctagaactgtactagcactaatttaaacaaggatttctatatgtggttttgctgttgagcagcagattgtaaattatattccatggaataagtgttcaaggtattgttaacaggcataacacgtaaaagtgttctgtcgcccaacaagttcgagaagcattaggttaaagaaacaatcttgatttcgctagttgtttctaaatctccagtactatatatcttttgcattcttccttgttcattaaactcatttgctaaggagtgtctcttgaggcagggatagcatagtgattaaggaatctggagccagataatctaggttcttggtgtggccccaggcaagttgcctcggttttcttgtctgtaaaatgggaataatagttatctactcctagggttgttgagacaattcaatgaatgaaaccatataaagcattttaaaatgttcctaatgcatggcaatttctctagaagtgttagtcttgttatattttttgaaactaaaaggctgggtatctttttaaatggtgctaatcaccaagagacaattcccataggaactaatcttatcaggctaattattgtttgctttaaaaataagttacggggattttaatttttctctaacacatatggaattaggaaaaaaattaatgcaaaaagcagaacacatactaaattatgggattctgttgcattaggaatatagaaaaatataaatcatgagtatcaatataggaattgaaagaggcctctgagcttcagcaatgagttactaaatggaaacatcagagtatcagatcttatgttatttgcatctccgtatattaagagcacacgtgaatgaattgtcccttagggttagtgtaagacactaagtagctggattttctttctatcctcttcctcctcacactaaggggaaaaggaggggaggggaaacttcagtcatatgggtttaagtacaattctgagtggatcccaaagctggaaaaggtaaaacctgagactccaacctcagttgggggggtcacttctcccatgggactctaggggggtcgcacaaagaactaatttgccctaacgctgcaatactgaagaacaaagaaaaaaatgcccacctaggtttaaaaattcaaagccaaattcttcagagggatgggagttgagtgaggcctgggtcctacccttgtcactaactatatgtgtgatcttgagtgagtcactccaggcccaagcctggttcttcacctgcaaaacaaagggactatctgcgattgtcctgagacttatgaagcagagtagagatgaggatggactctcagtctggaatttggggttcttcccttcctccacctctttgccttgggcagctgggatcttccttatgtaacacgttcaggaaaaggagggcaggaaggtaaaaatattaccctgcagttgtagccaagctgggttctggggatggaagaatgaagatgaaggggacttggagggaaatgggaaggaacagagcccatgtaaaatcgagattgattcttctggacctgggcagtcatctgtagtcagtcctgggtgtcgctgctgggtctgcactgaaaaagaggccaagggggtggtgctgggggatagaaacatccatcaccattgctcagagtgtttaaacttccagagattgtcattaaacaaatttctgctgcagcctggcagccctcacagacatttgttggaagaaaattacgagtaggtgatttgtcagaggtaatagccaggctgagctctggatccttaatggcatttggaccttttgcctttttaaaaattgcttgttaaaaaattcattttccagcctgtctttgtaattagaattggaggggtcggggcaaagtgaaaagaaaaggaccaaacagttgctgggctttcaggccctgcactggggccccaggaaaattgaaacgggttgggggcaatatagggacccaaggagtaatgggacagaagagactctgctcataaggaagagaggccttcctggaagtacctggtcattacctgccaggaatagcatcctttcataaattaaggtcttatcttctgtgcagcagccagcccagagaggccaaggccagacacggcacagggaggatctgaggggctgggagctatgtatagattgcagggctgctcttcccagactctggaagcgttcaagcactcagagagtcacgaaaaaatgatcgctttgtttgttccttgaagtataaaaatggttttatttttagacattatagtgtttttaaaaatctactggcagttgtcttcagatgcagccttgggaagtggaatggtgcatgcaagggtggatgcaggcagaaactttacaaggagtcaaaggtttctcagccacagcactgtgggcattctgggctggataattcctggttggcggtctgtcctgtgcattgtacgacgtgtagcagcatccctggcctctgcgcactagatgccagtagcactcccaccaccactggagatgatcagactttgccctgtgttcccacagtgggtaaaactgttctgaattgaaatcacttctgtatcctcaaagtcatcagctttttttcctccacagaatgcaaagtgagggcagaaaacacaacctttcccaaagctgttgcatagtttttcttcagttttcaattattcccccagaccaccaagctctcttgtgcccacctgccttccagttggccagtgccaccccccaccatgggggtgctgttcccctccgttctctgatggcctccatcagatgaaatgattctacactcttcctcccccctataacgtaataagtttagtgcacactgtacttgtcatgaaatatttgcattatatttaccaaatatatttcctttaagtaaaagtttgccaaatgtgctgcttcagcaggagaaaacacatttttactcagtgtttccacttagctttgtttatgtgtgttttttaaaggcagtgctaagaggacgtactcctcctgaggtctctgggattctatttttttgtacagcattggttttcttttacactgtttcagtatttggggttccagaatgagagcaaggtgatatgctctgccagcaggagggccctcgctgggaagcacctacatatcatgtaggctggtggtgatgcatactgagtgggcacagcctcccacccatggacttgcaaacctctcgcacccagtttcagtgcacccccaaagaggaacaagaggcatttctcctaggaaagatgagctaaaccataaagtcaaggccaaagcagttgggcaacagtctaaaatctaaatgttttataagttctaaatttagactttggaagtggagtgtggttgaaacaagtggtatttagaagagcagttgttctaatacacagttctcatgacctcagcactccttgttcacaaccctttagtggctcctgcagaatgagttcagcctccttggcctggagtgcaaggctcctgtaattgcccataattgcctcatcacgtcttttcctccagccaagcttcctcactgtttgtgttccacacgtatagaaccactttcagttttctagatgtgccaggctattccacagctttgcctggaatgtccctctcttcttcccttctgcctggaaaattcctacttatcattcgtgacctatctcaaacatctctttggtgctacttttctgcccaatacctgtagtatattatagttctcataatttattggaattatttatgttcctttctgaatttccaatacatggtacaaagtagaagttccctgaatgaaattgaatggattaaggcatgatccttatcccaaagaggtaattcaggatgtgccattcttgagaagattttttaaaatcagttactaagttctaaattccagaaagtgcctagaaaattctatagtcttcacccagcctcttcctctggggaaggcctagataatcttaagcccacatactaagccctctgatcctgtggatccaaccaatacaagggtttttatcattattttcttccttgtaggctttcaatggtcatagcttccttggaactgttttcttaaactgaaattgaatttcctcttgacctttactctcctacctgagatataacattgacacacactgtttggcttcaagatgtgagtccaatttcaggataaatttcactcattgttatgctaacaaacccattagttctataaggttgtgttctgtcctgtgaatttggtctttttcctcctttcctttaattaattaattggcatctgagggatgctagaaaagaaaaaataccgaggacctcacagtccagtgagatagctaacccatctaatagttccactgcccacagaaggagcttccatggagacaggtactggaacttgagagagcctactggagggagtgacagcttgtgggaaagtctagacacagccttccagacgagggactgggctgtgacagtgagatccctagagaccagtggtgtgcccatcctccatgaccactttgctggtggtcatttctactcatcgtcacctttaagaaagacaggaggtgcattgggagactctgaacactttccataggaagcatgccattagaatgaagttttaggctaacactcagccattatttaaaaagctgtcatgaaagacgaatatgaaaggggggttcttaggccttgatcgatgctggcagctgagtgtagcatccacatgggaacacttactattgcctggaactcagccaccatgcccctttgatgccctcccggcagcagcaagttaattgttaagtcatattcatttataagatggagcttctcattttttttctttgtcttacttgttttccttcctttcccttctctgtcaagtcatctttgggaaggtttcttaattttcagaaagaaaagatcccgcaatccaagaataaaactaattataatgacaaactggccaaaataaaaaaatgacaaataatctgtgggctgaaattttcccaaaagccaagaataaataaaatgtcttttaaagtgtctggtggaggaggctgataaaagaactcaattatctgttggtttttttttttttttttttttgcaagtctgtgatatctgcctttaaaagggaaaaaagtgataaagtgtttaagagtataaaataaaatagaagttcatgagcttttgtgaattttgaggttgagagaaaatatagtcttagtaaaagagctaatgaatctgtgggtttgctttcaaaaatagcgtcattcaatccgcttcctctcctttatgttaaattacttcagttgcacaactagacacctgaccacctattgattttattagaactttaaactggtttactgcaaacagataccatactttgtttcccccaaatttgcctcatttccataagggactagaaaaaaacaaaattagcaaggagcaaatatttagaatttcaagagtttgatggggaatagggaaaactccacaagaaaataaaagagatctgacaatgccacacaggcatacgcagcggggtcttaccactcttaggtattatttgactttacctgggccctgtccaatctctaaagcccagcaaatgccccaggtgagatccttcctcagagaactttcacaggagatatacagccttgaaaaataaaagactgccataattgagaggtttgtgcaaggaatcctatcctagcactttcttcactgaagagcattttgggagcttttctgtgcggaaaacgaggagttctagagaatgcattatagttattgaatgcctacaagtataaccacaattttacttgactcttgagccaggtgcaagaaagagaacctcttccacctgtcaaggaaatcacaaactaggtgagaaaggagtagtagtcataataatagcaataataataacatcaacataataagagttgtcattgtgtttgctgctgtgtttctggtgccaggacataaatgtctgctcatgggtgtcataattttcacaagactttagatactgtttttgtcctcatcttacagttgaagcaactaaggccaagagaggtttaataacttgcctgtatcagctagctagtaagtggcagagccaggttccaaaggcagaagatttggtccagtgggcctgcccgctcttgatcacagggccacactgcttctcaaagacattgtgttggtccattcaggctactgtcacagcgtaccttagacggggtaatttgtaaataacaaaaatttgttgctcacagttctggaggctgggaagtccaaaatcaaggcaccagcaaatgtggtgcctggcaaaggctcacttcctgctccatagatgatgccttcttgcgtcctcacatggtggaagggactaataagctcccttggacctcttttataacttcagtaaccctattcattacagcagaatcttcatgacctaatcctctcccttcaaaggctccacctcttaatattttattgcattggggactatatttcagcatatgaatttggtggggagacacaaacattcagaccatagatgaagaccttgacactgctcatggagacctataaaaaggatttggggttcatagagaagagagtgacttgtgggagagttaagaaggacttttcaagcaagacggcatttcaggagacacaaggtggtcagtctaacagtagaaaatgaaatcagcagtagaaaacaacatggaaaattctgttcttaaattaccatgttggagagggatttaatatggctatgttttatgccagatttttttaaaagcctttcatgcataaaactatagtgatctatttagattcattaaaatatgtgcacatatatatgcatgaatttcattatgtggatatgtaaattaatgtattgggtgagagattatgttttagaatataaaccaaaaaccatgttgtgattaactttaaagaaccatctagttttggacattgtggcagttgtttttaatatccacaaatcagctgaattaggaaacataaactatatgtttggacttcatatttagagctatatgaggtcagcctcttcctccagaggcactgccagatgatagttgcttgcatggggcaacagtccaatgaaacaattaatccaaatctcattcagagatgagaagcaacttatttcattcactcattcattcattttcacatactcattgacttctattcagcaaatatttttcaggtagttcataagccctgtagttgactgtgtggtggcctggccaaggggcatattagccagagtagaagaggcaagagctgggtcttagtggccaggctgaagggataaagtgtgaggttggcccttgcagaagaaagtgattggacatcattccagagtagagtgcccaaaggaaagaaccaaagcatccctgatccaggccactgttgatgtcaaaaggggtggggcttttggcatctcatagggcgttcccagtcgtgacacattatagttctgaatggttcacataattaaggcattgattcgttccttaaatgaatcagaggaagggagatggaaatgattagacaggttgttttatttgcagtcacattagcaatagggttcaggaagggctcccattctgatgggagctttggattgcagaaactcttccccgtgagcccagcatcgatcacagagcttggaaatacaaactagagtttcatgagcaatggggaatcagagcttcttttaggatacttgatactgagtgtgcagcaacacactttgattggcagcagcctcccttccacagttgccaggcctactctgttctaggcactgagtgtacattatctaattatcatagcaacccagcaaggttgatgccattatcccattttacagatgaagagacttagcccataagtgagagaaccaggtttcaaatccagagttctgtgaccccaaagcccacattcttcctagtttactatgctacttctcctgagccattctgagcctcaatcacttgccagagagattggttcaggaatttgtcagggatagcctgaagtcccaaagtcttcagccagcatctgagcagtgttagaaaaggctgagactcacacgatgctatatgctgtgggaaatgtaatagacatgaacgattatcctagtcactattaaccaaatgctggataacatggagcacatagtgacattcaacagagttacattctctgccttctaggatcttgcaacccaaggtgcatatttacttgcttgaatattgagctgtgagaagaaaagttgctacgtttgtgcaagttctatttattatggatgctaaattcctataagttagctgaaccatccctagaataaagtactttattttagcccaagtgccaactgactgactgactgactgaatgaatgaatgaatgaatgaaggcatgcttgcttgctcttatagattaactctcttgctatgggtaaaccaaaagaaaaaaaatatttttccttaccccttaaagtgagtctactttgttttgtgggaggtagcaatttatagacctgtctacacattattttctaaaactcaagtattttggaagagcagatggggtaccatactgtatacactaatcatatattttgaaatgtatttctttttgagcagtttggtgacgctttatttagcaaaagcccttgaaagtttcaaaagcaacaatccaaagaacatgagtggctgagagcacagcggacagacagaccctccagcacaaggctaatgcttttcaaaatgtactgtggaccctggccctggcccctattcctcctgcccttagagatgatgatacacattgtcactgggggagggaacgagtggattgggcctgattatctgaattttctgtgaatcccctgggtgactgtgatatgcacccagggtggagaactagccttctacactcatatctgagtgctactcttcttacctcattctcttgagactcatattttcacttataaaattattagagaagcaaaagaaaaccccatcccttttacattttctgagagccacagggggagcaaataggtgttgagcacctcctacattgccagaagtttgacttatagatctggtttaatctgtacaagaactcaacaatgtttaaagaattaattggccctcagatatggagttgagttatgcatactgctcagttcatagcttattgtcaccctaaggccatgcaagaccctcctcttattttgttattgttcctcttcaccccccattccctacacccatttccttccctcctcagagaaccacctaatatgctagaactaaaatgaatgtctttacaaaattatatattatttttgtgtgtgtttgttttaatttacataaatgataaatctctgtaatatagactatatagaaagtaagaatgcttattttttcactcagtattatgttttcagatatatctatgttgtataaacttcccacatttgcataatatttcattgtctgcatttattccattttgtttatatcttccccagttgatagacactcagctccctgctaccacaaagaattctgcagctaacatccttatttgtgacccttggggacctttgtgagagttatatctgggatacgtgtccaggagttggatcctggggtccagatgtgatgtatgcctctttaatttcagattgttttacttaatagaaacaaatcagagttcccatctccttacatccccatttggtatgaaccaccttttgaattttcatcattctgatgtctgagagtgacatttaattgtttcaattcttatctcctggattactagtcagtttgagcatcttttcacatactttttacccatttggatttttccttctgcaaattgcatttttatatcctttatccaattctctatttttctaatattctaggtgttaagcccttgtcagtttcagaggttataataatttacttcgtttataatttgactatttatcaataatttcttttttgaataaaaatccttacaatttaatgtagataaatccagcaactttcatctgtggttagtgatttaagtatcttttttatgaaataattttctactcaaaaggatattattcctgtttttgtgaataaggtagttatttcttattcagtactattgcccaaggtcacactactacctagcagcaggatttgaaactattaataattacctgttaataaattaaatcatgttattcatattttaaaagcaaccaagtattatttgcactaaaacattttctgagttttaatcagagatctcaaaaaattgcaccctgcagcttctatcagtcagatttcactgaattttcctttctgcccctaaattcttgcaaagtatctcaaatcacattacagccaggctggttgaaattacagctttggccctcattaagctaattaccacttgtacccaaattgagccatttcactccaataacactgtaaaccagtccttcctctgtgatgtctctgccttgcctaggaaaatgtgaggctgatgtcagaattttctgtctccttagagcaggaggtttccagctatttctctaaggagctctgggatgcagctcaagtgtttgataggcagtgtaagaggaatgagggtggaaactggggaaccagagggaaggctgggcacaggccccctcctcaatttagcccacacaagtgttgccttcttggttttgtactttaggcactatgtaagtaaaatctattggaaaagggattctactgctaaaaggaatgggggagcttggaagcactgtcttaaaaaactagactacttaatataaactgatttattttcatctctctgctcatgttacatttgtatagtgttttacattttggaaaacactgttacattatttgagtttataaaacctgataaggtaggcatatctcaaccactatggcacaatttttcacaattaaagctccatatcacagaatctgtcccagcaggtgactgaaaggctgcatctcaggagtgtggcagggattatcaccggcttgggtagaagctggacctagatgatccctaatctccctgctcgtgcaaagatgctatgactggaaatgatgagagaggaaagttaacaccaaaagaattacctaaattaaacctcctgcctattggaggtagggatgatgaaattcccatgtttatggaacacctgttctggtctggtcatccaggtgccgccttccactgaatccttacagcaaccctaggagagaggtattgctgtatccattttaaaggtgacaaaactgaactttataaaactaacgggaaaagcttagatttcctccctgagctcgccagctcccataccactgtctgttctttccactcacaaggatgaccccaaataaacaccacatcagttagccgcccagaaccttatctaggcagtggctgtttggggaaggaagttctttataagtacttctgtctcacactgggcatcacgttgatgcttacatcttttccaatgctcacctcctgcctgggggtcaagccacatcatctctggtttctggctgcattcatcctccttattgatcaggtcactcgctgtgactcagctgttagcatctctcctgctttgatatcttggattgccaacacaaacccatgctatttttactttgcctcagaaaggaagattggaagacagcagtccagccttctggtttaccaagttgttgattcttcttggctttctccattcattcatgaattctttctgtacttcaagccgaaaagatgtgtgtggctggaaagccctttgtggtggatccatctctaaggcctgaatgggggctgaatgtgatcacagctttggagatctttgctttctctcttctgactagaatcctttacagtatgaaatcactctttccccctcctatcttagataaaagaataaacatattgaaaaatgtggctgagaaattttgtttcaaatatgcatatattatgagtagtgttctgagcaagacagaaaaattaccaaaaataaatgcatgtaagcttagccttttattagtagggctgattgtttaagaaaccactttgttagcaccaggcacagtgacttgagcctgtaatcccagctcctcagggggctgggcagaaagattggctcacttgaagccacgagttcaagaccagcctgggcaacataacaagacccccatctcttaaagtatatatattttttaattagcaggatgtggtggtgcacacctggattgcttcaacccaggaattcaaggctgcagtcagctatgatcgtaccactgcactccagtctgggcaacagagcaagactccatctcttaaacaaacaaaaaactgctttgctaaatgaaagctgtatggatttcacaatttgaatttctgaatttctgaaatcttgcattttataccagaaggcagtttactcatgtgtctgatcattctaaaccaatggagagttaagaatgtacatttcatttcggctgggtgcggtggctcatacctgtaatcccagcactttgggaggccgaggcgggcagatcacgaggtcaaaagatcgagaccatcctggccaatatggtgaaaccccgtctctactaaaaatacaaaaattagctaggcgtggtggcccacacctgtagtcccagctgctcaggaggctgaggcagaagaatcacttgaacacgggaggcggaggttgcagtgagccgagatcaggccactgcagtccagcctggcgacagagtgagactccgtctcaaaaaaaaaaaaaaaagaatgtacattcatttcatatagtaccttacgttgtacaaagtgctttcatatgcatgatctattttacgtaattactctatagggtaaattttatcatctctatttcatataagcaaattaagatgcgaaaagccttaaactttctaatatagtactagtttaaaaagcaaaggacgtttagtttgcagtcacctagccctaacacatacaagtaatttatttctttagctacaaacaatactaagttgatgaagaaataatattatactttgggagagctgattcataagaattgtcattcagctgacactcaggtcagtatcaaggaggcaggattcatggaagtaagcagggtttcatatcatccgtgtgaagccagggctcttatttgtgaactgctttccttaccctttccttacgctctcctttcaagatagcttcctgtacctagctgccactggccagtttcagtcaaagccccagcaactttccaaaggtagaaaaacgtgcatgtgcatgttcacaaaatatggcacaatttcagtttgtttgtagaactttcaggtaataatccttgctttaaatgggacatggagttttaaaactccaaacaaatctctgaactaccaagtcctatattgagagactgtcaaagatcctaccccactgctgtatgattggaggattctagctaggaccacatgctttgttatcagcacaagtcagtagatcagcaaacaactgcagtacccagaaactatagcatagggactcattttaactcttgtatacatcactcaaaaccttttcctcatgaccttctggtttgcctgtttcacaaactcctctccaaactgtcctccaaggtggggctagtagaacacatgttcaggctttgttattatttgttgactcgtatgtggcgtttcttgtcccaattcattacataaggcaaagattctactgtaaggacagtaagaatgttgaacacacacttgatcttccactgtatcctcggcttcagttggtcaaactctgtgtgcagaactcaactcacttttgctatcacagaaatataaacattctgcaattttcacctccaaattttgcctctttttacaagctctatgtaatttcctgtgaaacaaacttattaaatacattctattcccccatctaaccttgttgacattcctctcctctaatacaatagcctttcagatcaacagggtccccaaacagatacagagatgtattaaagttttctgttatttagtatttgctgggtacttgccacatactaggtttcccttgaggaacccagtctaatgaatgtggccaatgtgaatttataaattacacacagtgtaattaacatagcagcagacccagaatttcatgttgtgcatgctccaccgttccttgtctgatggggtgagtcgttcacttagagcagtacccctcccgagcagtgtgctaataagtgctttggagatggatcctcagataaatcttgactttgagatcctttcacagcttcacaaagatacacaaaataagctttatagtgggaggtagaagtgatacgtgccatacatatacagaaaaacagaggaaactaatatttattgagcatatactgtgcaccaaaaattcttttcaacactttcacttatgttatctaatttaatattcgtaactatgcttgaggcagatattatcttcagtttacagagaaggaaattaaggctcagaggtgataaataacctgctgaagaaatctttgttccaatactcatgctatttccactctatatcactaaaatgccttacaaaagatatcaaaataataaagtgagaaagaatatgacccatttagtttcagttttctcttgacttcattgatctctttcctcctttctactacaggtaagtagatacctgaaacatcctaaggggttggcccttaggagctttaactattatggatattttagtaatttcaaaaataaatccgtttggatttggcccagcaactccctcctgtctttctcctatgatttacacagtctccgtcagtactcatgttggagataattaactgtgctgcctttctaaggtgtctttccataggtgtgccatcctaagcatgggcattccttaaggagagttgggcgtggcagcacctttgcttgtaatcagggcctctcataccctttttaacataaccactgacaaaccctctatagtatcctttcttgggtgggaattattacagctccagtacatctatgcagtatctcagaagttgctggatgtactcactaaatgacccagatttcatctttctcacaatttaacactttaaataaatgccagcaagcttcaccgcattagaagattactatatgtctgaacaacttggatatcaatatttgtcatgcagccttcctcggtgtaacatctaaagcaatactcatttagctgacgtacattctctgcatggtgtttacccaacagtcatcactcatgtttgctcatgaggtgttggggtgatgagccgagctgctgtattctcagctgggcctggagcctgcttagtttggcactgattaatgatatgtggggactgattaatgacatgtggggagcaggctgtttgcagagccaccttagaaacccagttagctaaagacaaatagctgagagttggccgatgggagcaagggaggtgggctcttgagaaaggagagtcattttgagagatatcagcatgacttttggtgatcttaactagaggaagggacagattctgcagtagacaatgcttttgggtctggcttcttggtagacaccccaggatcaggtctaaggtatgttacccatgtattcccataacagcatcatttctctgtgctttgagtttcaccatttataaacctgcttaaagagcttatcttcttcctaatcataccttgagacaaaatgcactttataccagtaaagtatcatgagatgttcgtttggaagccgttatgccaaaagagcaagcatttacagccttgctttttatttaccaagtgtattttacactggaaaaggtttcaatatggccccatatagtatttattttgccttatgtccttcctatgtctcgtttttctttcttatttcattcacctactgtgtcatgttggtttggcatccacttcttttctaaaattgtatcttttgtattttttattctttaggtggggcagcgaggaaaggacgcattgatcttgaagttgtagagataatgtctcagcaccctgcttggggtgccatccttttagtggcatggcaaaaccaagcacaaaatattttttattgtcctttccagaatagatccctttctccacagcaccatgtgggtggttgttcctggcagagaacacctttctctctcatactgtaagttccgttggcaactcctgaccagggacagtagcaacatcgatttcctaaagatagatatcccctcgtttagaaggcattttctcacaagcttattcagaatactcaagtcagaagttataaggatgtccaagctcattttgggggaaaaatacagagaggtgaaaggatgtgctgaaggttacacaggagcagtaggaaaagacagacacaaagccagggaggcaccacgtgtcctccttaactgttcatctttgactgtatagcttcattcgtctgctctaagatcttgcatttccagccatcgtttatatctggtcctatcaaagctcgttgaccaacattctctcttttaacccttcccctacagtgcaaggtctgcactgtacactctcatttattgggaatctgagacctagagaggtttaggaatttgcccaaggacacacagatggcaagtgagcaagccaaggatttggaatcagttctgcctgattccagtgcctgttgttttccttccatctttcactagagccaaactgatcttgagcagttgtctttccattgacctgcaaagttctaaccactccccttactccactttttagattgagattatacccatcctgcaggacccatcagagcctgctttgttcatttagtgtttcccagccaccttgaaatggaagtggtctttcctcctttgaatcacatggcactagagcctgttcatttggcaccagtgcctgcaaagcagacagcctggagcaggtaggaatagggagctctaggttcaaatccctgctctgccactatatggcgtatgattttgagtaagccacttaattctatcttggcagatccatcaaccggacctctaaagtccagcttagccaaaaattccaggattcaaaagttattattatattattgctaataatattgtgagtgtgagttgagttctatactaatctgtgcctccctcacccctactttcctgttatctatgcccacctcacccctagtttcctgctgtctatgcaatgccttacgcagaagaaggggcaatggagtattgataagagacactttttgatcttcagttgtaactcactcccatttatttgtctgtttattcatttggtcattcattcatttatttattgctggcattgaatttttctattacttcccaagattgtttctgagatcttctggaggcctcaccagtactttgggacaatatggtcataggtttggaattaaatccttgaagaaaaagactttccattttttaaatataaccaaagcaaataaggaaaagtcactcttacaatgtgagatatcagaaaacaaaacttaggcaaataaaccaaaaatactttgtaacattttcagcattacagttttttcagcatttaatcagtctttgtgtacctgtacgtacaagcccatagttaccaacccacacacacgaaaaaagaaccaattaatttaaatgatcaagttcatgccatgttcaatggcgcatgtccccttttgctcctaaaatctttgatcgctttttagcttctacagttccttgggcattcattgtaggagatggcagttctgcctgccccatcagcagacaccattttgcaaagcagaaaccatctttgtcccttctacccccagcaaattccctggctcccagttttcacctgtcagatgtccatgctaattccaagactcctttatcacaataataacagaagtaaaattctcttggtggatggatttcatttataataaacacctttcttatttacttactacttgagtgcttacttactactcaataggagctatgcattactcactaatctttttaccaacttagtgcaatagcattcattaatcgtaggttaaagttaaaaacatctttcattcaactctcacattctgaagtcaacttcagctccatgtttccattgtaatagtttaaagcatatgctttctaattacagaacttggattcaagtctctcttctgtcatttaccagtataaatgccctgagacttgttttctgcaactgaaaaaaaaggatagtccctatttggtaggattcttgtgacaatgtaatgagtttaaagattccaagcttagagcactgtgcccatgcttagtaaacacccaggaaatgctaatagtcagcattctgttgcctctagcagataggaggtgctttatatgcacccaactcacttgatactgtacctaattaggtgggaaaaagggtgggtattgaatttgttttcagtttttaaacatacgttttctaattcaagatgagatacatggtaaggtccaacataagatgtacgctcttcttaaataagaagttgagaactgccattacactatgtagtttaaaatttatttatttttgaagccggctttgattgtcactttacaagatgtatgccgttttttcccttctttcacactatcttaaaaaaaaaaataacaaatcttaacatggcattggctttgctatataacaaaactctaatacaaattatatccttttggaaatcattttgtttttaataaacaagtagcaagaacatttttgatttataaataaacattacttctaaaaaatccttagtaatttcacccaaattataattctaagaaagttccttagacattgattatagtcagagattttttttctagttacaaaatcattgaaatttgaaaagaaggaaaatggtggttgtgctaaacatcagtaggtctagaatttgttcactatttcagtttattcaacaaacattcaacaagctccttctgagctgagtgcttggcactgttctaggacccataactatgtccttacaacaaccagcacatcattgtcagaggtgttagtattgacttcagcagccaagatgggaagtgatatagaaattctgtttagctgttgggtcaaataattttcacaaggacataaaactgaacacaagttcaggcccggaaaaacacttggattagtcctcaaggaagtctagttagtgcttattgggacttctaagaaaacctgatccaaagttattgacccgtcctgtgtgttaggtaagattaactaagtgcccaccaacataggagatggaggatagtgccattgtgaatgccaaatttagcggattggtggtggctacttgcagacagagtccaggttcagcagaaaaaagaagtgccgtgatagattagtgatgtctgccattggcatgggagagaggagtggtgggatatgtgccacataattgttgtttattctgtgtcctccaaaggactcatcagtaaggaaagggactgcattcgggtgagagaatgggagacccagcagatttctggaaaccattgcaataactggcttcacagctgtgagaggtagaacagaggagcagaaaggaagagggatggagtggagaaacacaagaaccttttcagatcttgcttggggtcactgacttcacacgactgaggaactgtccaggttttgcagagtcagggcactctgggctgttttaattgtctgagttttgtagctgtggtgggtgacaggttcccctttaaacataataaatggcttgcaattactttactttggaaagcactcttctgccctgggacactgtaataaccagccatagaagagaaaaggcctagggatttatgagggtgtcccaattttcaaccatttgggagaaatacagcagaacattggtacagcagtgtgttagtaagagttaatctatcactgctcctctctcaaccctctctttccctctgcttaaaactatcacagggattcgtccctggccttcatgaagacttgccagaatttttttttttgtttgcacataactctagaaatacaatctagttgaccttcagtttctggaccaaaggggacattttccaggtatgagggattttaaaattcagtagtcataaaaagacaaatgaagcatggtctcttcctttaaagggctcaaggtcctgctggggagacgagtagtgaataaataatttcactgcactctgagatatattgttgttaaagcaatagggtaagaatggacatatatttctaaaagcaaagaaacggtgtgcataataaatcactttgttttcctgcccctaaattgtattgataatagcacttactgagatctactcttataatttgtttacacagcaactttctaagcgccttttttttttgggaggtcttgcactgtcacccaggctggagtgcagtggtatcatcatagttcacttgcagcctgggctcaagcgatcctcccaccccagcctcctgagtagcaaggattacagacatgagtcactgcacctggcctcacctaagtgcttgagtttctcagcggtggacactggtctggttattctctctgctcccagcacctcctcacccagtgattagcacatattagtcttggtaaatgttagctgagcgaatataggcctgagtatacttctaatgcttctaacataataccaggcatcaacaacttattagaaaaaatgtagacaatcaagacatatgtattgtttcaatatttcattaataattcagctgaatgtatttgaaaactaaaatggtgttttcaatttctcaacaaagaatgggccacttaaaatatgacacagtttgatctgtgctaaaagggtgaaaacataatattttcttgtatatatcacagaatcttgacgagtaggctctgaagttcaactttgtggccacttccactgcctggtctgtctgttgaggcaagttcatgaacagtttcattttggttgattgtactctcctcccagggtgatttgctggagtggtcttcgatttcctctgagttcagcagccttgcctgatggcagagctggtttatgggaaccagacctgcttttcctacctcatttcccctgtggtcttgcttgagcagtctgcttaggaaaagtttatcaaatctcctttccagaggggcaggttttcccatttcatttgtcactatttaacagcttatgcaaaacaggctggcagttctaagtttgtggggcttcgggttctacccttgatatgagacaatggacttttcatttatttctttgtagtaactaatcttagaggagttcaaggctaatttatctgtatccactgatattcctcttctccatcttctgtttagctcattcattcattcactccacagatgcttataaaactggtattaaataccagaaacatagagatgaattgggtaaaacccaatattcatagccattgaggagagatcaccacagtgaccattgactccttcttttcaggccataccaatgagttgagtgaagaaggggcagtgattgagtatcagatctgttggtaaacaccctgaatgttgaaagggatgcctgtggatatcatttattcattaacaaagacgataaggatttgctaaccattcctagcatcttgttttttggcatcatgattgtgtaacttggaaaagaaaaatccatccagtctcaggtacttcttcaatggaattcctcccctgattttggggagctcctagggaagtgaattcaccatcccctccccaccaaggacaggcagaacttaggtgcaagaaagcagcaccccaggagttactccatgtagtttaggagaccttccatatgggagggtcattccttgtaactacagaaggatttgtaaaaggctttgttttcaccccatgtttggcaaagtatggataaatttgaacaggcattagaaaaaccaacagtagcatgattattaaaaatttgtagccattttctcccaatcctgttggtgaaagagttttccagaaaagaaactctatttctttctgcttttcccccaccgtgtctcctcaaggtcacatgtttggaactgacttgcttgacatgtttatttaaagctgtggattaaatgccacccactaatgtgatttgcttgggctttgcctgaggcaggctccattagacactggtgaaaatagcttcctgttgtccagccaagtccttcgattagctaaccagcaaatttagcccaattgctgtatttcaatttgactctctatttaaatggagaaaagcagctttgtcacatggctgtttgcctcttgatctctcatctcaagagcagactgcaaagagaaagcgacgaccccaaacctcaccttttctgtctcctcttttggatcagctccctgcagatgctaaagaaagtgagaaggatgttgcttgcataaacattgttcttcaactgagcactaattgagtttaagatgaattgctggttaacgtttttgcttatttatttttacccattataaagatgccttgagccttaaattaaagtgctttctcatgagatgcagggcagttattcatggcctgtgtctgagtcttaggagtgggacaacacccagtgagcacctgtgctgaactgcagggtaagacattgcataactagttatttagggggctaacaccaaggccctcaacactcctgttttggattatgatcagattctcaggatgcttgaagctgcctgagcaccgctatcccctgccatccattcctgtttcattagaagctgcaaatccaagcaaggcagtggcagcactgggagcagctcccttcccaactgcttcagtgccatctgtttggctctcgaggcacatttgaaaagtcaccttttatactttcatcacagcctgtccttaggttctccaggcgctgcctggacactgccagccacaagcctgcctgctcagggtgggcactcattgctgcccagctctgatggagattctgggaacactgaccatcactgctgcccaaggaggtatgggctactttggaagatgttggctgcccttgctaaagcaggtccctacacagtgcctgatccaggtagcctgatgccctccacatgcttctcactgaggcagcccagggggagtggtctggcctcaagtagcaggtggtgtctgagggacccgcccaagcaggctgagagcaggcacagtcccctgtccgccaatctgactgtccccagtgagagtaccaatcctatccgtgctgtcgggagcagttgaagatcaagctttaggaaaactgtgggcagtaacaagcggaggactcagctctttggttggcatctgtaagtcacattgggcagcacagagggaagggtgcaggccctttctcccttttcgctggaactgcagtcattcctccttcataccttcttgtgctgcctaattcggaccagtgttcctccaccctagctgtgcatgcacctcccctggagagctttgcaaaacatgacccatgtccagaacccattccagggtcagaatctcaagggatgaggccaggcaaagacatcctgtgaattgtattatacagtgaatgttgagaactactgattttagaggctatttctttctggtagtcatttgatgagcccattattcataaattaaacagataatttctcaatcattactctgtgactggactgtgcaggctctggagatgagatagtaataaaggagggcacaggtcattacattatggtacagtcagtgctatgatgggactgtgatgggagaatggggacaggaaccctgactttggctgaagtgcagcaggtcaggaagaatgataaagggtggtaacatctaggcctaggcttgacaaatgagcaggggctagaaggaaggtaatagtcatggataggaggaagggcaggaatgaaggcacaggagtgaagttcaagcactgagagaatcctagtgagacaagattgtggggtgcaagggcttggccaggtaaggacgtctctgtgagatgggcaggtagacggcaatgcattggagaggctggccttcacccaagaggcaatgctgggcccctgcagggtttaagcaggtgaatgatatgatcagctttgcattttggaaataagctggctggagtgaggaggagctggaaggggcacagttgaagtcagaaggttgttgggtaaaccaggaaaggcaatagggcaagggtccagggagaggtcaatgagaatgacatgaagtagaaggaacagatattcaagaggcaaagtcaacatcccaccactcctgaaaactctgatcctcagagcagaattcctgactttcgtcaacatgcaggttcccaagctcaagaagtttcattattttgatcattgctacatcacttgccatcacttaccaaagacaccctcagagttacggatggtcacaaatccaggtatatggcacccagagaacaagacttgggttgtcagtggtttgcattcaagaataactcaggaagaagaaaaccaatagagaaagtttcagtctgctgtggaccattatttttctcatggcacttaacttcgtttttgatgtgatgccccgtaagcttcgcattggttgggttgtgaaatgccatcctacagaggaggacttacaaggacctcactgcccacattaagcacagcactggctttggctctaaattaggtctcatcaccccttcagacagatgctcacaggagcttagagctcagagggccattagggacacactgaagaaacagaggcaggagaagttaatgacttgctgagttctcttgttactggatgccacgattagaccacacatcctttgtgaaatgcagagaagcttttttgcttttattaatgaataaagtgtttcaaattcatctggtataattgaggacacatgatgaaattgagaggagccagaggttgcacactggctgagctgtgatttcaaagcagtttctctccatttacattaaggctgaccccacaggaccctagacaaggaggcccttcaccaggggactgcagtggtggaaccacagtgagaggtgaggcagaaaagagcaaggacaggccagagcatcttccaagccctgaaaccattcaggcagagtcgagaataccatttgatgaaaacacctctctttaatctgtcggaaccgattctgttcgatttgtcctgaatataatcttgaaccaccctgcatgtattataaaacacccagagtcatcttgtgaagatacgtaagttgtttgcaagctgcgaggggattattttttttttggataagatgtctaggactgtgattcagagggaaccttataacatattgggtgcaatgctctacatctcttaatcctaattaaagattattaccgctactttatagataagaaaaccaaggttcagagaagttgagtgattttcccagcttgtaagtgacagaaccagactttgaaatgacttctgcctaactataaagccaggtgttgttttcattttacactaggcattggcaagctactgctgcaggccaaatccagcccaccacctgtgttttgtaaataaagttttattagaacacagccatgcccattcacttatatattgtctgtcattatataagttgccatggtaggcttgagtaattgcagcagacactgtatggctcacaaagactaaaatactgctatctgcccttaacagaagtttgctaacccctgtctaagcctcattgtcctaaaataaattcagaaacctcaactgctactccttcagcccagacagcacctttattttctctctccttcattttaatatgcacgacaccactcagcaaaatgtcctgcatgcatggcctggcctaggtactccactccctgatctggcaaaactataaagtgaaactattttgagtttccggaagctgacccaattttaaagacctctatatggaggtaggccagggagggatcaataattgtccctaccaggtaagccatcagtttgtaccctcacttctgacactttttctgggcaaggccatttctccacattgtacccttagagtgtagccccaaagcgatccctggcctctgggaaattatccttcccacacatgagcacttagggtcttcttcccccagacccctctgcaggcagaatctttccaattctttggttgttgtgagccttcagtccttttgttgtgcgtaaggaacattcctgggaagaaaaatggtccagcaataaagtctcccccacatgagtcatttttagctagactgggttggcatctgtttttcctaagacagccttttctcgtcactgtgaagataaatcaatttaatggacaccactggttgggggtagattgtactttttttgtaagtattgaccacccattagtggcagtgcccagcagcatacaccattgtaccttctccagaaaccctccacttggctgtagatctatccccttccaactctgccctggaagcaagcccaaaatgacctctggagccctaagatgccatcccacggccacgggctttgttctttggctttgtgaaagtgtgctttataaaccttgttggcagactcataattctgctaaggacttatttgttgtgtcaatctacagatcaaaggtgggagcctaaaagcctttgacattgctcataccaaccatattacactctgggatacattgtattaagtactatgggccatcatacaagtaagaaatagttcctgccctccagggacttacaatctagacagcatgaaatgtacaccaataactagcttcactgcttgctggtgatatgacaagacttgctggaagttgtagatgccatatggaagactcagaaggggtgctggatatttgctgaaatcggtggttctcatacttgagcatgcattaaaatcacctagagagctgttaacacagattgctgggtgccactcttagcatttctgattcagtagatctagggtgggcccacaaagttgcattcctaccaagtggccagctgatgcaagtgtggcccaggaataccctgtccaaaatatttttataggagaagcttcttacatatgtaatttccttctgggattgtaacagaactgacatttgttgagtgtctaatatgttctattcagtatattaggtactttggctataatattttctttagattttacaaccctgtgaatttcgtattattactagcactctacaatgagcaaactaaggcttagaaggaggaacttacatttgccagatatccagtatgtaccataaaggatgtggggcattatccaatttaaaactttttgaattctaaatgattagtactcctagtttaggagtggtaaaaaaaaaaaaaaaaaaaaaaaaaaaagatgagtaaagatagtaaaaatgagtctgagagagattaagtatcttaaggaaggtcaaagccccaggaaacatgcatgctggattcaaaatcacgtgttgggttctaaaggctgagaagccatactgcagctagtacctgtctgtttgccaaaagctactaatgtagattccaaaagcatgttttctttcatgcttgaagcatgtacttcctacctccttgcctttgctcatgctgctccttctgcttagaattcccttctccctcttcttcacctgagtaactcccattcatcctccaagcaaaatgttgtctcagccatgcagacttctgtaacatcccctccttgcctcaactagagcaggaataaggactactttgtaagcgtcccaacatactttatattatcaaattccttcacagaccccaaagtcctctagtgacatatccttggttacagaaacaaaaaaatccaaatttttcattttagccatcaaagccatcccccatctgactcaacttgcctttcaaccacaccttgcagctccctcatttctccaactaaacaagaccgctgaacacttccccacccatggctatgttctccttccccctccaagccttcactcaggctgctgctgtcaccaagaatggcccctcccctgcacctcagcctgtctgcatgtggcctttccaccagccccagctaaagccctggtgctatgccctcagccctttgggagggcctccatgagtgttcatggagtgaacacctgaccccttgctcccctgtgacatcgcgtcttcccttgggtgaggcaagtatgtgtctttccactgtcccaggctgagagctcatccggcacagggcctccagtgtcgcgtcattccttgcactgagtaggtgctcacaaaacatttgttgaagaaatggataaatgatgctggatgaaggttgtgggttaaaggcaggatgggagaagtgattagacaaggagcacgtggagcctcagtaggtcttgcaataaaacacaggagcgcatttacatgaccaacagtgagagcaggggacataggtggactttgccagaatgcttgattccatttaggaacctcctgtgcttgtacctttaacccggtcttccaaggagccaaaaggatttctccatttgaagtacaaatgtcttgtgggactctcactttttttgtaatgtgtaacattattacagaaaatatgggctaagaagacttcagaaacacaccactgacatggtccagacatcgattgaatgatggggcaataccaacaacaaatgcagattctaagagcgtgctttctttgatgtctgtgtttaattccattgattttctgatgtctccgcaacaccgtctgtgggtttttcaaacaaatggtaaagggtgtgatgttttctaaagaagatagagttaaggatggtggttgtgaatgtcttgatttgtgaatgtcttgcacatgtgaaacattaacagagacataaagctatcagttgtaaaccttgtagctaaattgcaaaggcacagaggaatgtttgacttatgtaactcttttgtcttcttaaaaaatttaatgatacctttcacagaggttattttccttgacatgcagagtgaccatagaacttctcagggctgttgccaacaaaactgtgaagtgaagtaggtgaagctagtctttgactccaccaacctctgtcctgtgctttatacccactgcttatatcccttcctctggggccaggtgcctgctttttccttctgcctatcaacctagtcttaggaaaagttctatactttcttcaaactgaactataagtgatttggggaaaattcaaaggattgctctacttatgtattcttgcatctagcaaggttcaaagtcttaagctagaggaatggggctctaggagtggattttaagcctaatctataaataggagttaaagagttccccacattccataagggatcatcatgatttccttgcagaggtgcacccatgagcctgtaaatgcaggcgatttttaaaagtcacttgttgaattaactttgctatttccatccagcttccttctcctactcctccctttccctggacaatctcagccccacagctggtcctcctcttggacttcaccatatgtatttgttgggattctttggttgcacgtgacaggaacaaactatcatccaagccatcttacaaaaaaaaaagaaaaggctcttgtaaccaaacaatgaaatgcagggcttgagtcacctttacagttgaacaaggcttaaccattaacactctttcacacacacacacacacacacacacgtctgttttctttgtcctactactgacattggtctcattatcttcccctttcctatatgtgaagggacatagtctcacagctctcaatttgagggaaagagagcatgcttcaggtctgcctcaagacgtggcagaaaagtctggggaaggattttgattggtcagttcaggtcacgtgcccacttaggcccagtgctgtgtctaggcagatgtggtgtaaacaccatcatctctgtgacagccccttaagaaacacatgacatgagggaatcatcttcttcatctgtaaaatgaggggagtggaggtcactctataactcttagctttaacctgattctatttaaaaatcatatcttcatttttggtattcttttcactatatctttgtctctcaccatgtccagcctcccacaagaaagccagatatcattgggaaacagtaatgatctccttggctcaattctaagtctctctaagtgggcaaagcagcacccctatggtgcccgtcatatgatacagcaaagcattatagttcaaccttgaccaaatttaatcatttatgccacatgatgtaagatgatcacaatttccaaatttgtcaagcatcccaaatttggcattttgcctaagttaaaaaaaaaacaaacaaaaaaccagcagatctggtgaaagatcaactggaaatttgcctgtatgacattatgctgggggcatgaaacaatgcttatgcagttcgttccaattcagatgcaacccaggttcaaagcagctaatacacagtggtgttccagattatctgtctatttccattcccatgaaatgtcttcaatgaaaagcctatctacctgccaacagagtccatcagtctgtcatctctatcatttctgcacttctattataatgatccttggccatgtccacctttcttatgagaccattagttcacggaaggcaagaaatatatcatatgcatattcgttcaacatcaaatctatgccaaatccatcttcgtgggttgcttgggatcctaggattcaactacatatatgtgacttggggcaagtcatcaatcctttctcagtcggtttccttatcttttacatagtgatactagcacctcctccactgtattggagggaggattaaataaggtgataaacagcaaactgcctagcacagaattcaacatatagcagggtgcatctgtggtttgtcttatttttaagttcccaaatgacacgaagaatggtggcatgggtggcagcatagtcgggtgtttacaatcctgatatccagtcccagttcagccacttaatgaccaatggtatgattttgaagtttcttaaagtttcaaagcctcagtttcttcatatgtaaagtggacttgatggtaatatctacctcataggtttgagtggataaagaaagaaaacatagataaagcacctaccacagcatctggcacatagatacctataaatggtatcacttgttgctatcacctgtaatggagagtgaaaaaagaagcagcaagctctgagatgcttctgtgttttttctggtcttttcgtgctgtatgcatcctgatgaagatgaacccacattaatagaggcagtggttaattgcctccttgtgggctagcactgtcctgaggcagaaaattacagtattcttcttttttcttgaagcttccagtgggatatgtctgttctaatttaataaacctctttttttagtgccaggctcaaagaggcaatatcacatgtacatttccaaatgcgtaattagtatgaacactcaagccctaactacatggcgaaagcagtctgggagaggggagtgtgagtatctgttcacattcatttgaaccagctccagccaaacttccacagttaattgtatctcagcgattttctcctggaaaaaaataattactatgcagggctttagctgctgcttggccttcgttcattcctgactcttgagttagcattgtttacagtgttgagtcagcagcagtcacataatgtgtcaagcaagtggagtacacctcccaccctgagcttccccaccccaccagttccctgttatcaatccatttccttccttgtgttccagcaatgcaagagaaaatggaagatgggcataatggaagttgactgttttggaaaagcatgctcaaggttaatgctgagcatgcgtgcagagggcaccagggaagcagggagcccttaactcggaaagacttttctgaatgggaaaggtcagcccccaggaaaatgatggtcttcctttcatcttcaggtaatgcaggtggtgaaggagcaggttatgagagcacttacaaccaagcctagctccctggaccagttcaagagcaaactgcagaacctgagctacactgagatcctgaaaatccgccagtccgagaggatgaaccaggaagatttccagtcccgcccgattttgtaagttacccagtattgacttctatctcccaaaagactctaacccactatttctagaatgaccgcctgtcatgaagctgggctgtgttgtgagctcctcagggaaggccagcagaagacattccaagtatctccatttagttaggggagtctcagcagctccttgaggaagggctgggctgagtggagtgggccagttgctggaagaatggatctaaaccaggagctggccctgttagtgacaagtcctccagggatttgtagattaaaagtttggaccttttccaacacttggaacaattttttttctctttgaccagtaaaactatatttcatgtgggtgccctttgaatagcaagaccttgtgagccagccagagtgaggcccattcattaaagcactatgaaaatgaaagtagcatgaatctaaatgagtgggagtgagagcttgagaggaagagagtgaactacctcctctttgccctgttggcactggttggcatcggagcatgctatatggccctcatgactgtgaacctacattcctacagtggggaggcagcaagccccacttcacaggactttgcaaggaatgccacttgcaaccattgcaaaatgtcatgtattccaatctttgaagtgttctgaactcacacatgaggggtattttgcttgcttcatcttttcttagaactgctctgtttctcttcctttctcctgttctaagagctgggtcaattttgttacccgtatattttaaagaggaaaaacacagggaaaggcatatgtgtttgatatttattctcattttgtcctcagaagactggacacagcttcttctgagcttttgcatgaagccaacttgtaacatagttttaattctgaaggcagtgctcccccaccacacacacctgctctctttctgtttctgattctttccctttttgtttgttgctctccagtatttgacacttctaatgcttggcaatttgtaatgcacccttcttgctatttcatttctttacgtccctgtgagatgggcaggccttactcccatgcaaaggctaggataggcaggtcttactcctatgcaaaggctagtctggaggggtgaagaccatgccaacaagtggaagagccgggactgagcctcgagtctactgacccctcagctaatattgtgtttgccctgccctagcttctttgcaatgtgagagactgaaatgaggtttaaaaagtgcacaggtctaaaaggacaatagctaagcagtaacatctaccgtacatttgttttccaatcttaagaagcactgttggaaactgtggagtagaacccttcagactagttggcatgaagttagttagcggggcagggaaaatgcttccaaggcgctttggcttcatcattgcaaaacctaagtcatacctgcatgagcaccagctagccttgacaagaggcaccactggggttttgcattggtcctcagccagaagacggtaacagctagaaacaccaagcaggatgcactttggataagtgactggctcctcagagatgcagtttctcacctgcaaagagggacaatggctccttgccccatcccagggcctacagtgtactggatttcataacatggttcagcagatgtataaacgtaggacactttattatgctttccataataagtcttaaaacctgaagggagacttgaggaatcacttccgttaaagccaagtaactctgaattatgtttgatgaattatgtttgaccttgactttttccaagtaagaatgttaattaacttcatggcaagtacgaacattttactcctattttggctttatatcttcacttcctaagactttgcctgtgacattctgaagtttctttcccctttattataagatgctcttatctttgaaactatccaaatatgaaggaaatctcctgcatggatgtagcttttgcataatccctcggccatggaccaagaagtaccatggcccactggagttcttgatatctgtagctgcagcaaagtcacaaagagtggttaggagccacagcatttaagcaggtgggccagggaccagtttgatagtgaccccagtctctgaagccggcagagggtagctgcgatatgttttgcctattagagtgatctactagacaggaattcattatggggttacatgaagtctaacttctgccagaatggctcacacgataaaccaagtcacctaagagaaagaaatagaggagtagaccatgtatgcttgttttcattcattttttcatttcacaaacatctactgaacaactcctacatgccaggccctgctcaaggtgctgggggcagacagagacccagagacacttggtctccctctgtcacaggctaggattaggggtgggggatttaccatagactgggctcattgcttagttacaggaagagcacagaggagttggatctaacccaagcttgagggttaggatattgggattttcgagctgaaaatcacccttaaggccatccagttcaagcttttcattttgcagacagggacagcaacttggctggggcctgaccaccagtggggaatcccactagccatcaggctgccctcctccctctgtgtgtgccacacacagcatggtggcagacctcagctccatgcagaccacttgagcaatacaccctgttgttataaaatggtcgttttctgagaagaaaaatgtaaactccatgtgaataaatattttgggggaatatatattcagtgggtcaaagaagctctgttttatttcttagctcttgactaattgtttcaaagaggaggtatttgttatgtcctatttagtgcaacttaccaaggaagataagtccatccaattaattggagttaatggatataaaaagcttgaatagtccaaaaatcgatcatttaacactatgctggagaggaaggggagatgtaaagacaaacatcagtgaaagcagggaagcaaaatgtgtaaaacttggacccaatttgctatcagactgacctggagtcatttacaaatgtggctctgtaagcaagttatgtaatccgttctaagcctgcttttctcatctctaaaaatgaagatatcaaaaatgtctacatcattggattgtcataaggatttgacagagtcatgcatgaaaagcacttttcatatgcctgggacctaatatccacttgaagaaatgttctgtcttattagcccgtaaccagaatttaacaagttgtgatactgttgatatgtaaatgataaaactgacactgtgcatatatttgtattaatatatgcctctcccttgtcttagaaaggacaatagaaatccatgggaaagaaaagcaaaaacaaagccaggaataaagctgatacctaccctgcaaatctgcatcctcgctaaagatcagccgcatgcttcactgaaagctttctcataaccaatgcaagggggacagtctggtcagttagacaatgttcagtgttcagacagctgacaaatatctaatgagtgcctgccacgtgccagacactattctatgtgttggcaattcagcagtgaagagaacagacatatttcttacccctacagtgattatattttagtagggagaaaaaagacaatacacatggtgaataagatgacagcaagttaagaggagatacatgcagtggagacacaaagcaagataagggaaatagagtgcagttttaaataggttggttagagtagctgtctctaattaggatggtgccaattgagtacagacttgtaagggactaagggagcaggccatgtgggtatttgggagaagggtactccagacagggagaaccaccagggcaaaggccctgaggttggagcaggtctgggtgtttagtgaataaagaggaggccagtgtgctggagcagaataactgagggggagagagcaacggaaggtgaggccagaaaagtgcagggagccccattacacaaggccttgttggggagccattggagggttttgagcaaaggaatgatgtgatgtgacttaggtgtttaaataatccctctgatgctgtattggaaatagacactaagaaagcaagtttttggaagcagggaaatcaaatgggaaagctattttaataacccaagcaagaggtgatgagaaatgattatagtgtactgaaaatgagatccattttgaagagaagggacaaaggtatttcctgattgattaggaaatacctaaggggtgtaagagaaagagagaagtcaaggatgaactcacggtttggggccttaacaactaaaggacagagcaagtggagcaggggatcagaagttcggctttggatatgtgaagctacgagacgtccaattagacagtcagacagatgagcttggagttcagcagagagatggacagtgggtagttgctcagtagggcagaccccaagtcaaagaaggaatctcaccagtctgatggtgctgtctgtcttctgtgcatggcagtggcctcactgggcttgaacttgaaattgttttccagaaacagtgctagactttgaattgctcttcacacactctttaaatcttctctcctttaatcttcctccttttatttattggcaagacctttggatagaatgagaaagatatttagcaaagcaaagctagtaaacccatgaccctggcctgattgaccccaagctcagaatttcaaaacccagttatagcccatggggttattacctggcttaccccagagggcagatatcggccacagaaacatactgtagggcttacttatgttttcttaatgtgtatgaattttacggctactgagtccattcgccaggaaagaagaaattgctttgaaaaagaaagagctggtgggcacctgccatgagccgggtagtgcaatagaaagaaagaaagagctgtctcatttccttcattgcctggtcatgttttgtagtcctttgaggcttataacaaaaaaaaagcggggagtaactcttgtagcagcagattctcttattctgatagtgcatcctcagaatatggttccatgatgaaatgcgttgtgacaggcacctctgggtcttacacaaaaaagtcataaagcatcagttaagattactcagaattccttcagttgtttccttctcttggtcttcatcactgcattctccactccattttaataactcaaccctggcctagtgaaactgttatttaaatacatatatctataacctaagaattgatgaaattccaaaactctttctcccagattttctccatcctctggtaccgtgcctttgtctgcaccctgtcacctggacttggaagttgggagcagtgatttattgctgtgtgcagctccctggcagttacccactttcttttccactcagtgcagggttcttcaaagctgcaatttactgagtccattttagatagagctaagtgctgataataaatagtttagtgatctgaaagcctgaaatgagaccctaagagacctgtacagggaaggctttacaaatgtcccaaactattattaggactgaatttccatattatgctttatagatgttcagttggaacagtatcaaatgagagaatgtttgagggcacttaagcctcaaaaaatgtattaatggagtactagaataccctgttagatggccttatccttttatgtaacttttttcttttttctcatgagtaaatcaaagcagtttgcacaaggaaaacctgagtctgtgcccatattccacacgtaacctccacgagttgtttccccttctgtaagatgggaatgatgggaatgatgacattaatactttccccaaaagctgttattttcaggaaggaaggaaggaaggttaaatgagctaaaattgcatattgcactacctggctcatagcaggtgcccaacaagcatgagtacctttctcacctcagaatggagcactgtgtgagaacaggttgcctgcagttcagtgtcaaggcaagtccagagttaaggtggaagctgatgaatgtgtgagccttgactacagggtaatatgggcctatggactgtttggcttgaggaaaggagagaatgtcaccaaagcaaattcagttgtgccttacattcctgctcagtgcttaataaagacttgtattctgtctcatttgggagtcacagcaggaaagattcttattcccattttatagatgaagaaactgagacttagatgagttacaggaaatgctagtcgtgagcagagcctagactgaaactctagtcttctgacttgtagatctatgttctaaccagtacttcttacactgctatgaggaatgggctctgggtctccctgtccagcttcaactagaatagttttggctttactagactcaaatgctagggcactacataaaatttcctatgataaaaatttctgctctaaaaaaaaaaatttgaaaaccatttcactctatcatgatatctttgcagcataatggatctcaaactaaattatattgcattagcctgagacaagatacaaataatctttcatttttcccatcattatctcagtctctgtgggctagaatctgggacagtgttgttgtccccatttgtgaatgatggaattggaagcaaaagtggtcctgtggtttgctcactacacagtgtttgctgtggaatagtaatcgtgtggttgcctaatatgcctgtttaatcagatcacaaacacagtcccagagtttagctggtacaggggaaaaaagttgaccaaggattgattgtcttagcagtgctgaatggatttttgcataactttgtatccgtggctttgtaaaataaaagaagaaaattttcaggacactttgctctggaaaaacatcactgaagtagctggttcttttgtggaattctgtaaatgtcacagaatctattgtggtgttgtacttatgcccctggccactgactcttaataaacacttctctaaagcaccaagttggaggtattagatgctcatgaaaagatgcacttgttctcccctgcccgtatgcccatgatgcccaccaagccacactctgtttctcaaggcatgctgtggaatatgtgtttttcctctaacagggaactaaaggagaagattcagccagaaatcttagagctgatcaaacagcaacgcctgaaccgccttgtggaagggacctgctttaggaaactcaatgcccggcggaggcaaggtattgtttctggggacactccaaacttggatagggtaaacagtggcccgctccctggagaatcacaagggcatggtgttggtttacgggtaggccatgcagcattgtactcaggacaggaatagcagtccaggtcgtttctggttcccatgcacacccagagagaatcaaagtccacaattaccagaagagccacagaaatgaagagccattctttgctatttagtgccacaaaaactgctagtggtggtgtcaacaatagctgacacgtatatgagcctaccatgtgccaggtgcttctgaaactctagtcttctgacttctggatctatgttctggccaatacctgttacaatgcattactttataaagcattttatcctcaccataaccctaagaagtaactactaggattgtgcccagtgtacagattaggaaatagaggcactaaagggctaagaaactggcccaaagtcacagaagagcaaggattcaaactccacagctccaggacccttccttttaatgactccccttgctgtaggagagctggcactcactgtttggtttgatcttggagcttccagcatggatggcccttattgtcaaatctcccacactgcttctcttctaggacagagttattttatatgtggatataagtaacagtgaactaagatagggtagcatcacttacataatttctcaaggcagatttctgaattgtctctataaattctaacctcaaaatgtcaaattcaaatggatgtcaaaagagtagacccaacaggtgggaaacatgtctagctgtttctttcctggacaagtaaagcacccttgactgttttcttgctctcttgacatgctgctgattgcacagctagagtcttcataccacactctcctagaagcaaacagccagagcataaaactgaaaagtaagatttgggaagaggcaaagagattgaagaagaggcaggagcaagcacaggcattagcagctatactaagaacaccagttatggcccaggagaaactttggcagatattttgaaacctgctggatgccctgctaagccacagagctcacccactaatgacaaaaatcattttgtgtttgtcagctgaactcatcccccggccatttactgtaactgtcctgtgctgcatattcagtaaattggaagtatttctcatgtcaccattaaacatcacattgaggaacttccaaaggcagaacttcctggaggaatgaaaatgcagtttcttcacagagaatgagaagctcttagagtgaatttcaagctgagcctcaggagaggacaatgggcagagtaataagggctgagttacagagaaagcctcctattagtgagaccagtggaagagggaactcctccctcccattcagccactgaagaatgagttcatgccctcctctcatcgcgttccttgcatcgggcatcatgtcagagtaaatggtgttccaagaagaccacagggctcagtggcaaggacatagccctggaaccaggcaatgtgggtgcgatcttgcctctacacctgtccagctgtgtgaccttgggcaatttccccatccgaaatggggatagcaatgcctgtctcccaaggctatcatgaggaagagaggtgattatgaatgtagcaacaagaaacagcaaaacaagggagctactgctgttctttaagattgtgtaggaaaaaagcagtgagccagagtgagtggacttggtgccaggcttctcagttctttaaataaccacctaggtgtctttaggaaggacacatgacctctcaaggccccaagttctcatctgtaaagtgggaggacaggattaggggatccaggagctcatttagtcagagagtcggttgtatgccctgatgtctttattgcctttggaaaaatcaatgtttgggatatattgcccccataaagatgatttataagatttttacttacttgacattgggcaaagggcacagaagttttggggatgggaaatggcaaatagacacccattgcctccactgctgcccagctagagtccctcacaacctagctcctagcaccaatttaaccttctagtctactgcgtcatgagacttccctgactaggttgaagtgggtaggttgtatcagaataatcctgtttctagatgtattaactacagggtttgttgttgttgttgttgttgttgttgttgttgtttaaaaaatgttagtcccgtatctataaatttttccaattttctaaaaatgaactacccctgaacaaaaaaatattagcatctagattataaatttatgagttgagctccctagggagcatgaccatctgtgtttaatacaaaatcatccttccgagtgcagaaaggaaggctttttggtatttggtaaatggatttgaaatctggtgactggctctgtgcttaaaaatagggattcaaagcagactgtgctgaaattggtttcctatcaccccatcaaaacattccatttagatttacacagattaataagaacatgacatttttaatcccttcgagaaagacgcacttctacatgagatctcagactgggatggacaaccgcctgcctggtgccaccacaggttaaagagcagacactcccagtgcaggagccagcaccatactccctctaaacttgtctgacaatgagtaggacacagatgagtgaatttaagtagttaactttataagggaaaatatgaaagaacttacagctccacagaactggaaagtgaaggaacaaatagagagtgctcgactgtgccacgtttggctagcaggtccccgagttgatacttgctgatccttctgcctgtctcatgtgcagctctgctactggaatagtcacatgcagacatttacagatctgggtttctgggaattctaaccacattaggactgggaggtaatatatctcaaaagacacaataagctgggttgaagtccctgttcctactcactagctgggtagcctcgggcaatctgctcaatgtctttgtgctcctctttcttcgtctttcaaatggggataatgttagttcctctatcaaatagccataaggggtaagtaaaattatacatctatagcactttgatgcttggcagattatcaaacattcattaatgatgtttgctattaattttagctcgtagcgcctcagaatatagattttttttttttttttgagacagtctcgctctgtcacccaggctggagtgcaatggcatgatctcggctcagtgcaacctctgcctcctgggttcaagcagttctcctgcgtcagcctccactgggattacaggcacccgccaccatgcccgggtaatttttttgtatttttagcagagatgggatttcaccatgttggccaggctggtctcgaactcctgacctcagatgatctacttgccttgcctcccaaagtgctgggattacaggcgtgagccactgcacttggccagaatgtatatttctaagcacaggaggtggagtagcatgggagcccacacacctgcatcactccactctctccccaagcttatacatgttgaccacgaagtataagctctggtcgcagaatccttggcatggaaattgcctggcttctgtgttccctggactcctgcaggagagatttcagatgaaaccccagaagatgtctgtgttagggacactgtattagtccattctcgcattactataaagaaatgcctaagactgactaatttataaagaaaagaggtttaattggttcacggttctgtaggctgtacaggaagcatcacagcttctgcttctggggaggccacaggaaactcccaatcatgatccaatcatggtagaaggtggggcggggtcagcgaggagcttcacatggccacagcaggaggaaaagagggaggaggaggtgccacacacttaaacaaccagatctcaagaggactttatcactatacagtaccaaggggaggatggcgctaaaacattcatgagcattccacccccatgatccagtcacctcccaccaggacccacctccaacactggggactacaattccacatgagatttggtgaggacacagatcgaaatgataccagccactatttgcttcatgagaatctgtaggctcaagaactgccccctacttctcttgtattttagagatgaaggtctttcagaatcacttgcattgaatggccttggtaagagtccagggctaacattggaaatcatttcaagaagtgataacatgaaacctcctgcagaggacagtgtctgtttcattgaccagcattccctaagtgctgacatgacaggcttatgttggaactcaatgttgggcaaaatgtgtgcctaccactcctgccaacaaggctggtatatcttacgttgctctggaggccccctcagaagacctagagccaagtggtgcgttcaggcatggtaaccatattgccctgttgtggggagcaggtcattcctttctccatccctggttgaaattttattttaatattttgttacaaaaaggcaggtataaataaatacatattttcaaattatgaaaagccagttcattttcatgaaaaaaaggcacttcccaataggtcagaataatacataatcattgtttccaaaagatggagggacagtagtgtggacgagagggactgccattgactagaagagcaggaaactacaaatatgttctgagaaccaattctggaagatgtaggatccatactttatgtgtgttttactcatataattatgaccattgtacatatgaagaacagggatttctgaagtttttacaattaggccaaggccccgcagctaataagcatcagggccaggtgtgtcacccagctatgtgtgacttcaaggcacctgttagaccaaatcatcttggaaagtacctagggactccggtgtcatttgctctgagcagctgtgtccagggaggcagaattcagaatcaaaacacaaatctgtccttttaaagaaagctcagtgaagtgaggaagatttgatgcccttcgtctctgtatcaatagttgtttcccttttttgtaccaacaaaaaaatcttagatctcatcacctgaaagatgacatttccctttaaacacattgctgggtccctcttgttttgtgacttggaaagtttggaccttaggcagaaagccgaccttgttctgaacacacagaagacttggcacattttaggttatccttgggaaaattcagaatcctaatggaagtgttctaaagacatcttttagaaaaacctgttctcctccctaatacaggactcttagggcccccggggtcagcccccagctgctgacagtgggctctgcactcaaaacaaagatgtgtcctgattccatggcagtctcggggtttggttcttgctgtgccctgtgtctcactgaactggctggcatttcacacctaccagtggttgccattgttcagcttgctgggctctcctggagacccagggaccagccccaagcttgtcttgggcctggatgattgaagacagacggtgggctacactgtctgatagaactacctacggctgtttaagttatttaaaatgaaagaaaatttataatttgttttcttagtattggataaaacagatatagagaatttccatcattgtaggaagttctgtaggagggcactgcaaaaattacagttgacagtggttattagctccataacaatctatgtgacattgggaatagctttaatcagcccttcttaccaggcttgtgaactctgaaagcagctcttccctcttatccttcacacacgcacacgcacgcaagaaaaagattgaaacacgaaattctccctgtattttgttttgggtttggagatgaagcctggctattaacgtacgctcattagtaattgactggaagacctccacattaactattgttttctccaaaatgctagtaaacaatctttgataatgttctcactgcttcctgctaattgcttttagtgacgcaattcactctttcatcgcccagagggataaaggaacaagtaacatcatgctggggtttgaaaggaaaatacacatttgtcttgccgtaaaagaaactgcaaatcaagctgctgctggtggctgacactgaaactgtctcacccaacatgtcgacgcactgtgctgatgctatccttgtagtggctctcccttcaagacagaaatacacaacgtctaagccttccaaagctaaggactccagttttactgtgaggaagatactggctgagtagcctcccatttgattatgagtcaagacaagtttctcagcgttttcagcccctttttccaatattttgccatccatccaagacttcctaattgatgaggagtggaacacatcacttatatctgtgatgtaccaatctttttgctttttatcgttttagtagtagacagaagaagagaaacttgtataggataagagaattagccagaggtaggaggaaaaccaaggcaagatggtgtcatacaagtcaagggaatttcagctttggaaaggaggaaaatctgtccgctgcagaccctttgggttttctttaaacaaacatcaactccaactttgcaaggaagatggctgttttgcctcttgaaactctgacagatagccactgttctctgatcattactgtatgtaagaatatgttgcacaagagatttctgcattcctatttttctccatagtattgccagagttgctgatttgtcccagttcctacttcccagacctgggaaacaacatctttctcttagctgccttgaagaactgagggagctccttttccttgaactccttggccttgtctttcatgtctaccttccgttctaatgatgtttcgctacacatagtagagtgctgtgtgcattgtagacagccactcagcaaatattcattggataaacaaatttatcctgaaagtagagcagcaaaattttcgaagtcttacaaatcaatatatcttacacatgaatattaagttgtgcaatttactctacaataatatgtgtttgtattatactgtgcaccagttaaatttcttaattccctcaaaatcaattgagtgtcattgatcttgtttgattgtgacacattggcttggcttcaagtcccactgctgacccctagagtttacttaccccagcttgagaagcaagggattcctataaagcacaggccaagacctaactcacaataagcccagcatgtccaagtaccacttctcactgtcttccttcccagcctctatcaccctttagtcgctcacacagccaaacgtatcacctagatgcagcaaggaaaggaaaactttatagcagatttctccagttggctttctggtcatcacagccacgtagggcaggggaaagtatccgtggggagaggcagcccccacaggcccccaagagcactgttgatgttcagaaagccattgcctcctgctctggaattcacagttcctattgtaagttacaagtcaaatccccaaggttgctctcctcatgaaaaacccataagtacacatttgcctaatttaaatgtctgtgaattactcagagaataactgttttctccctttgaaatgctctcccagaaaaatgacccatgtttggtatatacatagcataattttgaaatttagcaatttcaaatattttcctagctgttaaatgacccttttcccactcaattttttccactagagttcagattcctttaaatctatggattgccgtactctgactatgcttcagaattctcaaactctatttaaagatgaggaagataagaatcacagagacactctccttttgtggatcaaatttgggcattttctttgttcattgtgtggcttttacttccattcttaaaacttctatttctattaaaagaatcataattaaaccatgggtttgcagtgacagcaattttagagagaaaaccacttttcttaaaatataatgaagagctttttagttagagtggcttgaaaacaaattatatttcaggtgcaataatgaggtaacttggccaaggcctcaaagggtaccaaccgcacagtggtgcaaaggggcttgtaggtgactgacacctcatgccttaggcattttgatcaggtccctttgggtcttcatttatcagcttagccaacgccaactgtgcaacttttatgtgtcagacactgtgccaagagattgggatgttgcaattatgaagacagtgactgtcatcggagagactgtgactcttccacactgtcagggctggagtcctcttctcctatcaatattaattgttcacaatacaccctcaagggcaagttacttacctagggtctgtagcagataatgggaaatactaaggtgttaacattaggctccaatattgccagtccaagccaaactggtggtgcaaagaagactgtagaacatctcagaggatggggagaggcccttcggctgcagggataaagagggcttcctggaggagacagctgcacaagcattgctgtcacagttcaagtccctaacctataaaaagtgctctttgcctctttcttcctgcctcatagacttactcaaaatttcttctcacttttgagagactgaggcagtaaagttgaggaagttgtttataaggatgaccctaatctcctggtcatacctatccagagaagtaaattctgggaattggagaggagaatgattgtgcatgtccccattctttggctaaatccgtgaattatttagatgatttcctcatgaatcccacccaccatgtgtattaccagtgtcctaacaattcgttcatgattaatgtgcgtgtggtagcctagggtaggggtttgttgtatcagctaaaatctggccttggacacaactgtctcaacagtctgaaattctcagagaggaaagtggaagcagaaacattctgagaaatctgtttttttttctatatctccctccctcttttgtcagtaaatgaataaggagcagttcccatggtggttatcattagtgataacataacctctggaaaccaccacctcataaaatctattgctattgagcttgaagagttcaatgactttactaatggttaccaaatgtataccaagcaggacaggtgataactaaatattaaagtcaaaagggaatttattgcccagggccctagaattcattcttcctcaagacttaaaatcaaatgaactgcttgtttcctccaggcaagagtattaagaaataaccaggctagtattttgataaaccacaatcacttaccttgtaaacttgtgttttttctctcagacaagttttggtattgtcggctttcgccaaatcacaaagtcctgcattacggagacttagaagagagtcctcagggagaagtgccccacgattccttgcaggacaaacgtaagtagctctccttggcagaggcctgagtggtggtcggttggttgtttcctagtcacaatatatcacgcaacagaactatcagcctaagtaagccctttgaacacatctcatctagttgtaagtcgtcgcctgagccatctcatcaagtacaagacctggatggacttggggtttggaactgaataggggagaatgtaaaatggatgcaaaggtatcttaattgaaagacgtaaactgggggttcaaatgtccactttttacattatttatccaggtgctgtgtcaaggagcaaaaacaatacaaacctgattctgtcagctgtctttttctgaaaacccaaaataatttcttattttcgtaacttatatgcctgacccctacaacatttattccttacaatttagtgtatcccatagttatgacacagagttaatggcagagccaaatatagctagtttacctcaaagacactttgaaaatgatgatccgttacctctactgtttgctaaatatttctcttgtatattttttggctttttctatatgttgtctgttttaacatacatgcttttgaagagacagtaatgtgcaggattcttttagccccacagggaaccaggtgccaggttgacagtgttaacaatacaaattaaacaagtattatagaaacactgaaatacacaagggtgataaattaatttggaggagaaatgagataaaatgaacgtagcctcagaggatatcccaagtagaaaaatccgagagggagaaaacattcagagcacttttaaataacctttaaaagtcaccttgaccttgcagtgttcagataagcgtgtcccagacagtgtccttacccagagtctcacaccttctgtcctgttaccctggggcccatggaagtcaaatctggattaccttcctcacagctcacggccattgaaggtgaaaataacccatgagtgggaaatttcctgacacattcagactctgcgctgacatctcaggcagatagcctagaacattcactcttcctccagcttaaaaatgggacagtctggtctttgtgatgtcacttagttcagaaaacgatcttgttttctttcataggaaaactttcttcccagcccacattattggctccctaagtcaggggttatagaaagaaatctgaaatccactgctgcagagagcctgggacattgtctatgcctccctgctttggggcaggagttaggggtgtcctgggcctctacctgtaaatgaggatcctcctttcacagttccagccttccccaccccaccttggccaagctagaccagcggttctctaaacgtggtccctggaacatcagcagcagtatcacctaggaacttcttagcaatgcacattctcagaccccattcccagccctgctaaatcagaaactcagtgggtggggaccagccatctctgttttaacagatgttcccgccagttctgacatgcacaagtttcagaactgtgattccccaaatgtggctttcactaataattttaaaaaaacaaaaagtttaagtaaattaatagcatgttgctaacttttaacttgggccaaaaaaaaaaaaggatattaaaaaataaaatctaaagtttaatatcacaaccctttcataaaagaaaggaccctcgattacaagaaaaaaaaaagtaagaaggacctaatcttagataaaagacagtcccttctgctaaactaaattagccctctgaaaaactcacaccagcattctcgtttttctgcatttgctattaactggtgaaaagctcactggtgtaaactcccttgtgaactaggaactgaccagagcccagcgatgtggaatcactgctctgcagtggttaaacagaaagagttgaggttattgttggttgaagcaaatagcagctccctaggaggtcccccacagccccattcttaacctgtcacaaggggaaaagtggtcaggacagaacaaacacagcttgactccccatatggtccagtgaatctgctctcccactaacaggacatagtgtttagccccatgtttatagggatgtaatcacttctcaacccaaagataggcacttgaccgacaggtttgccaggtgttagcacagcacccccatgctaattggccagctacctaggatattggcagccacagcaacaaagccttgtgtaggggcagttcctggtcttgcccacaagctaatgccccccagctctgctaagaccctcacccccaagactccagggtgaaaataactaacctggaactagaggtgctgatgccagggagagccagcttgccagggtgagtgcaggagagcaaggccagagctgcaaatctccacacagcttttcgcagtggccactgagcaaggctggttcttgaaggggttgtgacagcccctcctgaccatgcctccaaaactcttagcaactgctttcctctgaaatgaagttccaaagagctgctccaaaaacagtatatccattgcaagatgaactaacaatgcatacttgtgtggatctatttatctgcacaagtatttatccacaccttgtgggagagtgtgtgtgtgagagagagagaaagagagtgtgtgtgtactagtaagactgtatccttctgcacatatgtgctagagaaatgggtatactcatgtaatgaattgaaatgaagcaatactgtgcctgagacaaaaaaaaagcccggcctaataagctgaagtttcttgctgcaggcctgccaccttggtttgcatttaattccaattctgcattctgcctggagcaaaatagccaccttttggaactcttaaaagtcagaaacctcattccactggaaaaatgagacgtgcttttaattaatgttcagtgtcattgctcttgccacataacattgccctctcttgagaccaaggcagagattgtcttgtgccccttgagttaatccgtgctgaatactgagctattgataaatcaaatagtataatggagttttcttaatacagatagtgcacatgaggattgagggtgcctccttggctgtcttctccaaagctttaggaaatctttctttttgtattccttttctttgtcaggaaatttggcctttgaaaatcgacatcttcttacatcccccctctccccatatccctcccaagctgacttacaggttgtcatagcccccaataaacataggaccccactgctttccagccatgccctgggttcctcactgcctccctttgaaagaatctaggccagcattcctcactcccacatcagagggggcagggaggaaagttctggctcaccctgcccatgtggagatgaagcctgctccagtggatgcggagagcggcgacacagggaggcactgtgggcaatttgggtcaccaaagcacagcgaataattcaggtctctccatctacagaattaactctgattattgataatgggaataattgcaaatggcatttattgagtgcttactatatgctaggccctgtgctaagggctttacataaattattctcaacaacctaaagaggtagataatattgtccttattttacagaaaggaaactgagatacagaaagattaagtaacttattcaaagtcataagattagtaaatagtagagaaagatctgaatgtaactgtctaactccatggcctagattttcacccactactgtgtactgcctagattaaaagccaacaatgatctcagctccagcatcaggatttaactctcagagcaaccatatgggatagataatgttagagttacaaattgcagacaaggaagttgaggctctcaaaacttaagcccaaagtagtagaggcggttggtggatgtagaattcaaaccctggcactctgattccaaaggcgcatcttttccccaccattccatgccatgtggctgatctgctaggccacagagaccagattcttcatgcagctatcctgggatgagcctgtacctcctcatatttctgcccacaggagcttctactatggagctgtgcacacagcaagagctcaaggcttactagctacttcctttgaatggtttctgcctgaacttggatctcactgatgaaagctgaaactattttaatcatgggtggccacatttgctttttcagtagtatttttgttttaaatcacaattaaacttccttccacaggtattagcattcaaagagtttcctgaatgtccgaagtgataaccacatttggggctgtgctcagcatgatttggggggctggccccttacaaagggagaaatcatggcctagcaggggaacatgcagtggaagaagaagcactaaacccagctcttttcacctactaacctagctgtgtatcattgcataattgatttcctccctttaggatcagtcttcccatctgtaaaataggagtgttgaattaagatggtctcaacccagctcaaactgtaaaaagcattgaaagaaatgaggccatgccccagggggtaaatgtggtgggagggtgcgttcttcactggtgaccctgattctcacagatctggagcccacttctttatcttgcttccacacaaaaggcctcatcaaaatgctagcctggctttgaagtcatcaagagccccctgcagcctccttagagtgtagattctggagatatgagtctgacccctctgtttctgctcatgagaatagagaggccatcatttgagcctttctaatgcctaatcttctggtgcatctagaagacaaactatgcaaaaagcaacctttaaaagctacactgtatttttagaactttgtgttttccttttagtcataatcctatgaatgatgtagcagctggtctctaggacaagggacaatgcatataaaaaaatatatatgtacttccacaaaacctagtgaaaaagtgacgcttctccttggaagcctttctattagagattctgaagaccaccccccaggacagactatggtattactcttgtcccattccatacaatgggttttcaaagctaagggctaacttaccaattgtagcttgtggacactgtctctagttcatggaccatgctatatattataacaaaaaaactttctacaagacacttgtgactcaaactctatttgaatcttgagaacgttttttagaatgagtttgttgactatatcacattcacttcaatggtgggttttccattggaaagtcagccaacttcccagagtatccaaatgtcccttcctacggtagggattaggcagccagatcagctactgagggaaaggaggccagttcttggttatgaaaagggatttgaggagaactgaagtcagtgttcatggtcaaaggtaggttcaggaatcatagggaccacccacaggaagatgccaaccccaagggggtcaggcaaagaggcagaaaaggggtctgagatcagtcaggaggggctgtaatgctaccttgtgctgcagggataaacaaccccaaaatctccatggcttgcataacaaaaggttatttctcactcacgttatacaacatacacaggttggcaaagggctgctccatatagtcattcaggaacacagaccagtgtgcaccatgtcttccatcctctcactttctgtttatttccaaccctaggaattgccctctgactatcgtcaccttgtcctccctgagcctcctctgcccatccatccattccctgggcctctcctgtgacatctggatggaacaggtcactccttcagtttctgcagcaggggaagacagaatggagggcctccacctagaaaagaagcattttctttcacatttcattggctaaaattaatcacatgacctgactgcaaaggttgctgggaagtgtagttttctgtggccagaaggaaggagagacagctattcataactacaagtaatgtctaccagaagggtccagaatcaggttgcaagatgtggtgagatatggcaggggaacctacagagattcctggaagactcatcacaaccccactcttagggttacagagaggcctaagagtgtcaacagatatggacaaagttgttagtaattttagggtacctggaaaatgttagcatttgaggccttcttgtgtattgttttaatattctaggagtgtcaacagatatggaccaagttcttagtaattttagggtacctggaaaatgttagcttttgaggccttcctgtctattgttttagtattctaggtattctgtaattttatccttatctgtcaccttcacaacccaatttcccaatgaaaggatgtgagctttaactgtgaaatctctcatcatcttcatcattaagagagtctaaggaattgattacttggcattctcacacatcccaaattcttggtaaagccacactagccagcgtgcataccttgattcataaacccatatggggctggagggttagggattggagaggggcagatgactttgcattattttaaattaaggttccaaaccatcctattgccttctttctttcagttgatctttttgtttttaattttttattttcatttcattgtttgtagagacagggtctccctatgttgcccaggctggtttcaaaggcctggccttaagcagtcctcctgcctcagcccctcaaagtgctagaattacaggcatgagccactcactgttcccagcctctttcacctgatcttatcaaaagttttaagtgcacaaacccttccatatcttttcttatcttccgccaactccagagtaagacatgagataacatcattttgtctaactgcattatttccagaatcctgtatcagaaaggaattctccctttatttaattgagtttagttttgttgtctgtaaaacagggataataaaacctgctttatagaattaatgagatggcagagaaagagattttggagagtgagagttcagaactgtttagagttggataaattttttgagatagggctgctttctctcatccaaaaactcagaaactaaatagatgcaaatgctgtaacaagagacactgatatatgtaaagcacttggcattgctcttgtcacacaggagccctctgtaatatcagtatgagtatcactgttgttattacaatcactgttatttctactgctgcttctaatgccatgacttcaaacagtactatgatgggtgtttttttaggtctttgtttcactgaaccaaattctgcttacaagcaagctctttctctccagggatgctttttcccagaatataagatatattttagtttctaatcctgggacactacctggcttctcttcctcttttcaacactcttctttttgcagtagtttctgggaatggtaaccacagtagcggacccagtgcttagtcctgtttctttattgacatcaaagttttcacatggtgtagttacttgcattttcttttatgaattgcagtgccggtggcagatatcaaagccgtggtgacgggaaaggactgccctcatatgaaagagaaaggtgcccttaaacaaaacaaggtatgatttccaaattattgcaaatagctctatttgcccagtgcggtcggcaactgcagccagcctagccctcctttatagcagtgttcgtgtgtgtgcgtgtgttcagacacacatctcttattcagctctcctgtttcctgtcccgattccttttacgtctcttacccttattctttctctttctgaccccttttctgatgctcaccatcttttccattctctcacttcctgcctacttccaaccctaagaattgccctcactattgtcactttgtcctctcttgagcccgctctgctcatccgtccattccctgggcctctcctaacctcccccatttatgtttatttctcccttctccaacttccaccccaatatctttcattgtcttctgctgtaatcatgctcttaatatcctccccgggatctcagcgaagcctgggacaggcagagagcagctgactcaaagaatcttagaaaactttaaaggcctgatacccttcagcattgtggaaagtaggctgtgaaatatctccaactcagactaaaggagaaaattttcccagaagtgtgtattacttaagccctgcaatacctttcaccatcccctcctagtttaccaaccattccattatcattccattacagagggcacaggagggaatattatttgaaaagacagaagaatttcttttgcccgctggaagtatttgcccttggagaggccgtcagggagccagtgctttgtttatgcctcttagaatcttgtgatctataccattcatgaacaaaagtatccagattatctggagcacccagaaaatctggtaccaaaaatgtcacatagatcaataggttgcatctttatttccagtgtcagtatctaagagggacaccaaaatgatacacaatctatttaccaatcagcgttaaaataaatagtttccactgtgtaatttctattgttataagacagggaatccagttctttgcaggatggccctatctatagttaaggaaaaacaaaagtactatgaaaatactgttcaggaaggcagagggcaggggatgcagctgaagaggctgattgtaagatctttccttcttaagttctataactcacctcagctccatgggaactcctttgttgagcccatcacagcattgtcatgtaatgcatttgattggcaagcatactgatggcagggcatgcccaagaggccaggatctgtggtctatctgttacacagcaccaacgggggtttccgtttatctcttctccatgctatggggagacagagattctatagctcagcagattagagaagcatccttagctatagcagcaaatctccagttttcatggtttgcctcctgtggagcagactttcttcaacactagccgggattaccatatgctgcacatgtcaggtattctctccacaatctcggagagcacgggctctgctcagcttcagccgaggaggtccccacagttacgtaacacttggggctgagctggaaacagtgtggagaaattggcaataataggggtctgggagtctgcaacccagagaagaccaggaagggtgtacctggaaaaatagcaacctgccagaattcaagtgtgctaaataaagatagagggaattatgtaaaataggtgtggagggacttcctgtttcagccccaacatataaagagcttgagagttgtgctcccatcctcagaataaggagaagcgggcagggtgtggtggctcgcgcctgtaatcccagcactttggaaggccaaggcgggcggatcacaaggtcaggagttcgagaccagcagcctggccaacatagtgaaacctcgtctgtactaaaaatacaaaaaattagccaggcctggtggcaggcacctgtagtcccagctgcttgggaggctgaggcaggagaatcacttgaacccaggaggtggaggttgcgatgagccgagatcatgtcactgcactccagcctgagcaacaagagtgaaactctgtctcaaaaaaaaaaaaaaagaagaagaagaagaagaagaagcagaacaaagcggaaatcaacaagttttcttggacctatcctagaactgaggttgcaggcaaaccatcaccgtggaatgtggaaagtcagatgtccaagaagacataataatccttaacatgtctgaacttaacatgaagatatcaaaatccatgagttatgaaactgatagaacagaaaggagaaataaacaaattcattattattaatatattggagacttcaacttcccttggtcagtaatcagtagaccaagcaggcagaagatcaagaatattgatgacctgaacagcaccataaatcagcttgatctaattgacattaatagactaatccactcagcaacggcagaatacacatccttcacaagctcaaaggaaacattcaccaagatagaccacattttggaccgtaaagcatgtcttaaaaaatttaaagaatagcagttagacaaagtatgttctcaaatcacaatggaattaaactagaaatcagcagcagaaagacagctggaaaatcccccaaatgtttggaaatttaacaacacacttgtaaataacccacagttccaggaagaattcccaagagaaattacaaaatgtttcaaactaaataaaatgaaaatccagcttaccaaaatgtgtgggatgcagtgaaggcagtgcttagagggaaatttatagcattgaatgactacattagaaaagaagaaagaacgaaaatcaataaagcttccacctcaggacactaaggaaggagagcaatttaagcttaaagcaagcagaagaaaagaaatataaaatttagagtagaaatcaatgaaactgaaatcagtagagaaaatcaacaaaaccaaaagctggtactttgaaaagatgaataaaattgataaacttctagcctggctaaccaagaaaaaaatgagagtcacccatataacagatgtggagatgatttcatttgaacatgtgaggtagtatatttggccttgtatcagactcctctctccttaaaggagactaaaaaagtaaaaccgagtaaatgatgttttgcaacctttatttttcacatattgtcatgacactcataaaacataggatggatgatgatggatagatggatgatggatggacagctggagaatgatggatggatggagtacgccactgtaaacagataagactgcaaatagaggctacttcctgggactcactggcccgtatttctagctaccctgggctcttccagtctgccatgagggataagactagcagaatttcaagcagcctggccctttaattagcatatacatggaatttacttgtcttgcaatgttactagtgttcatatataccatgtcatcaagcaaaacatcaaaaggcagaaggaaagccacgattttacctgctgaaccccccaacccacacccctttccccgtactccagaggtgccctcctgtctacctctgggacttctgggtaggaaaaggggacctgcagcctaaaaggagaattgaccagaatgtgttcataagaggtctgtcagtacacagtggatggatgacaaccaaggcaaattgctggctctttggacagtttttccagctgtggaacagcttttgacattttgtgccatgagacccatggttaacttaatcaccgagcaaggcaaactgagacattggcatctgtaaaagagatactttgttaatggcagagtgttgataactgatcatcctctcacccattcggtctctgctgatgttcccagcagggccctgagaacagaaagaagaaaattggtcctttcccttgaggtgtctattgcagaggcatttgttcatgtagtcagtcatccactcagtcagcatgggagtgcctgaaatagcacaggactaaatggggtagctggggtcctgtctttctggagcttagagtctgttatgtttaacagagttcagtgcagcaggcacatttttacggagacaagaaatggtgggttcttcacacagggatcagaaagtttctcattgagacttgaaaagaattgccatgagtagatggaaattcagttggaaggttttgatttgcaaggattaaggattctaaattcaaactctataatttataaaaataagctgatttgtggctgtgtgctttaaggtgggcattcttggtgcttgtctcactgaatttggggcttttaggtcaacagtcaacatgaaatcaccagagtgaagatccattgattcagataggagtatatttggtgtatgagaagcttccatcttcccatttgccagaattaagcatttgtttttccagtgtgatgcttaaacctgaaataggaagcatattctactgaagctgatgttctagcatcagtttgaaaaccctggtcttagccaaaaagtcctttattcacatttacttcattcatcatccattcattcattcattcagcaatgtattgagcatctcctttgtcctaggtgccaggaatccaaagataaatatgacctggcccctggccctaggtgtccagtagataacatttatatttaaatatgcaattacaattcaatatgtctatgccaaaaaaaattaaacatggagcctgggagagttgagaaaggtgatgcaggacatggcatctgatctagcttttgaaaaggaattggccaggcagagaatgaggagaagactttccaaaaggaggaaaaagtctgaaaaggcacaagggcctttgctcatgtgaaaagcatcctctaattgggaatgttgaattcagagtataggatggatggggatggggagaagaatatggattggagaactattggccggttacgctgctaagatagattggggctggagagttgtaactgcctgaagaaggtaatctctgttatgtactacatgaatgagtgttttttgccttctaaaatagaaactcaaattcttagatatctggacagcaataagctatagttctgaaatctactgctatttctgtgaccataatttaacacccacacacatgccgagttatatcctgtgtcttttatcaaaaggttttaccctcatgatgacctggatagatagagaaccaacatagttaagtgaatgctagcaaaatggccatatgtggtgagttaccgtcaaacaatgtaaggattggcagccaacactgcacactgaaaatatgttgcatacaactctactcttgttatcagtcggttcctcatttgacccatggaagatggcagtccccaaacccaggaaccattttcctgagcatctgctgacacagcgtgccttgtcttctgtcccagggccagagtgttgaatacaaaggtcaggggcctcagggcatggaaggatgttcactttcctctgcctccactctccctaggactcaggcttcctccacatgacaaggtggcaagcaggcatcagtgcagcagagaatggagagaagctgcttctagatgtaatttttcactgcactaaatccagaggaataaaagagcttcggtcatgagcaacaaagcccctgaacattcgatgtctaagtgagtgttgtggtgtgtggaggcaagtaggccctgaggggggcacagatcagtgacagtctactccaccaccacctggcgccttctccctcatggacagtgtggacaggtggcagtttctggagtattagcctgagaggtgctattgctcctggctctgcagcctccccgctccaagtgctgaagagctgaccttcaccaatgactcaacaacagcaagccagagacatcaataaaacccattacaagcgataacaccctttaacacagacatgcagctcagagaattaattcctcccaccccctcccaggcagctttggtgaaattaaagtgggaattgacattctcacgaatttcccatttcctgcctgtgtttatcaggaatctaggtcatgacagttctgatcattcatgtcgtgagtggtatatgtcatagaagggcaaagctgaaagtttgcctgctccttttccttccttctccatccccctgcagaagagaaagtatcacagcaataaccacgctgacactgtggtctcaagtgacttcagcaccctgtccggagcacatctgggctgcagtgctgttcacaccggctcttgtcagcaaggggtgatcagccacgtgatttccctgagcagtcaggcacttgtcacccagggtcagcccaaaggggcctggatgaactttaccttttcctgtttacctccaagggccccctcacgccactgtaatatcctgactggttgttcagaagcaaagctcactccctcctttttctttcttcaatctctcaagcatgagtcagagagttttcctaataaatgactctaagattagtaaagaaatcatcattttaatgaacatgccaaatctgagtacaatttgtatgaatttttgaaattatagcttagcattttgttgaaaaaaaagttgtaagaagagataatgacctatgacctatcaccttaccataattattttcatttcccatatttctttccagtctctgtccacaagtaggaattgttcataattgtgatcagtgtgtacatggtgttcatgtctcgtgcttttctccacttaactttggctccctataattatcttactgaatggccaaatacatttcccttggtggctaatttatgatttctttattacccaaaagagggagaggttagtttctcataatgttctttcagataataatatttggcttttgctttcttttgaatttttcttttgaaattatctcaggcatagcatctctggttcttgatatgtattttcatattgatttttttttaaaaagaatgatatgaatttatagtactaatagtaagtctgtgactattttaattgtaaattaaaaggcccaagagagatggttatgggaacagatgctatacttaatggcaaattgtttttgtttgtttgcttgtttcggcgcccttcctttttacattattgtctttactgggtaggcctgagtcagggcctaaagaagaatagaaaatgaggagagcatttttgcagaatagctcccattccacgactcagcattctttccttcgcttgtttctatttctgtcaaggtgaggagaccttttgagtgtgagacgctggtagatctatcctcagaacaagacctgccccctctcaatgagggacagctggaggtgaaccagacactgagaactccatgagagccagaaatagttagatgatggactgtgtcaggacagggatgcagccactttggaataattctttaatccgtctgaaattctgaaatctgtaggcactgacctcatctttttgccttttatctttctggggcatttttgctgtgagtcacaggccaaagacaaaccctctaacagatattaaggtagagaatgatgtgaagagattggctccctaagaaagaatgttttgtgggcaattactgagcagtgtggctcacagatcacaggaggggagagggatggtcatcactggtgcctaatagaagcacagagaaggaaggcacactggaacctccatgctggaacagtgtagagcgttggtttggatacacttggctcttctcttccagactaggagtcctcaggatgctgagaagagctgatgactctcatcttctgctgaccgctcagaccactagaatgatcgtcttacccagtattggtacagcatgtacagtttgagaagtgtggcttaatgtacatattagacatggcactgagtgccttggtcattggtcattcacctgcaatgaaatgaaaaatgtcacttggttcctagacttctgggcctggctcattgcgtgcactccgtaggttttcaccaatgagtaagcccgtgcttctcgattataccttgcagtctctgctgggtaagacctaagctttgtgtagcctttgctgtacagtagcttaaaggtcaaaggacagatataaagataatgggttcacctagcagcctccttaaagctggcatagcgtccacattttagggaattcatacctctgtgggcctctctgtctttcttaggatgatagaaggaagggcagtccttaatcctgttgattgggagtttactgggtttttgtttgtttgtttgtttgtttgtttttgtggcctctctggaagggagatgctgaagaaaggagaataacacagttttggtggcgggcgaggaggcaggcggtgctgtcaccttggacactcattgagcctctctaagccccacctcataaaggagatgaaaacacttgctacatgggctgcatgcgaattaaatgagatagttcacagaccgccgtgaatggagagaaggaatcatgccgtgaaccttgaagagcatggttcctccttccatcagcctcattgcagctccgcttggctagacaagctggccctatgccatggtcaatgtgcagccatttgcaactgcaaaatgaaatgtgccgattttccttaaggtgctgttttctctcatctcttgtaggaggtgcttgaactcgctttctccatcttgtatgactcaaactgccaactgaacttcatcgctcctgacaagcatgaggtaagggtctcgggggtgataatttatgagataatgttatcttttctcaagaaaaatatagaaagaaattttacttaagaaaaatagacctgcctgaaaaaatgatgaaccaaggggcatcttgctgacttggaggagaatagaaacctcttgacaaactgcccgttgcaacagattcaacttcttagtagcttgattgatagttcatggtaaagaaaaaggatgtaaaaggcctcaaatgcagcaaaggtatacttgttaatccagagaaagaagcggccctggttacagctttggttttcattgaatttttcgtttttggtctggattttcccaagataaactggtctctcttctttaaaacatctgaggaagtaggttttctaccaaatttctttaagctattttaagaggtttagggctgtctctgctgttgggattttattttcgagatgcttttattcctttctgacatcttgttatatgtataatttgtttctcttcttgtagcacgctgtcagctatatttaaaatatttagcataaatctaggaaaatgcatttgtaagataaagtagcagttatggctgatttaactttcttttataaactggaacccaacatcatgcttgaaacttttatttttagatgataccattcaaatttttgttttgcgtgtggttgcataaacagctttagaaaggaagagaacattttaatagaatctgacttttgttccccatttcccctaggacatttagctcatttagaagttattcagtatctagttttcactggtttgaagcttttgaataaaattgtatatcccaaagagagaggaaagattagacacaaatcctgcatttagaacggtgcttaaatataattctgtgtcacttgacatttagtttgctgaagggtaagactttgtcttcatctttctgaaaatagatactgtgttctactgtttctgtttttaaataaaattgtggttctacacaggccaccatattcaagatgtatagagctgtgtacaaaactacttaaaatagtagaactttggatgttatttaaatctctgcaaggctgttttccccagtgtacattaattccagatcaggataaatgctctgggactgccagatttttattcatatctgccacttcttatagatacaatgaagagaaaaatgccatatgcttgtgaacacttttaattacttcagaccactttccttctattacctcattttatttccataattattccatacaatagaaagttctattacagacattctcatttatcaaatgagcacggagagacctcccagaactgaatacctcaacaatagaaaggttaacacagttggcccttgaatagcatgggggttatgggcaccaaaccccccacacagttgaaaatctgcccataacttttgactccccaaaaacttaactgtcagtagcctactgttgaccagaaagaagccttccccatagcataagcagttgattcacacacattttgtatgttatgtggattttatactgtattcttccaataaggtaagctagggaaaagaaaatgttaagaaagtcataaggaagagaaaatatgtttactattcattaagtggaagaggatcatcataaaagtcttcatcctcattgtcttcacattgagtaggatgagggagaaggaagaggacgggttggtcttgaggtctcaggggtggcagaggctagagaggtggaagaggtggaaggggaagcaggagagacaggcacacttggtataagttttattgaagaaaaaaatccatgtataagtgacccacacagttaaaacccatgttgttcaagggtcaactgtaagtataacgaccctggcttactctctgccaggcaccattaatgctttatatgtatatttcaccccagttaaccctcatataactctaaaagaatccccatttaaaagagggaaatgaggcaagagagcttaagaaacgtgtccagggtcacacaagtagtaagaggacagagctggaatttaaacactggcagtcttgctccagaagccctacacttaacccctgcactgtggagctaggaagagaaagagcagacactgagctcgcacattcctggcaggcccatcactcagtttctacaatcaccaactcatggccaatctggttcacctgtgctcccatccactcttccaccatcacccagctgccacccctgattattttgaagcaaatctggatatcattttatgtataaatgttcctgtatgcatttcccaacaataaagactcaatttaaaaccataactgcaataccctgatcacacttaaataaattaataatgtggtatttatttattaaaccatgtgcagtcagttttcagatgtctctaattgtctcatttgtgtttttttctttcatactttgttcaagtcagaatgcaaataagatccatgcattgcagttggttgacatgtttcctaggtttctctgaatctacaggtttctctttctctctctctgtctctcacaatcatgagcatgtgccttttttccttgaaatttatttattgggaaaaacaggtcattagacctgtaatgttaatagtctagactgtgctggttataactttatgtattagcttactgttgctattgtaacaaactgccacaaacttagtgttaaagaacacaaatttattatcttcgaattctggacttcagaagtcaaatgtgagtatcctgggctaaaatcaaggtatcagcagggctgtgttcctttctggaggctctagggaagaattttcccttgtctttttcactcaagagtccacctgcactccttggcctccatccattgcaatggctggttgaaccttttcatcacctcacttcagcctcctctttcgtactcagatctccctctacctctcacttctctgactctgactctgactcttcttctgtttccttctctcacttttaaggacctttgggattacattgggcctgcctggataatccaagataatctctgttttaaggtcagcggatagcaaccttaagtcccttttccatggaacctgacatattcacaggatccagggagtaggatgtgggtgtctttggaaggcgggtattatttttcccaccgcaatctgcaatataattcatatattcatcggtcccctgtatgtcttgtgaattgtagttaaaggattaatcaaattcaggctccctttctaagcagcagcagtggtgtttgtactttcatggtgacttcttgctcccctttcttggatattagcagccaacaatgatcgttgtctggatccttggaaccattagaggttgcaaaaggttgatatcctaattttattattccttctttattaaagggatatataaagagaaactggcctcatcaactatttggttatcctaaagttatacaatttacatatggtaggcaggataaatacttgattctctttaccagttttcaaaatagtaagcatctttcaaagaagaacaatgaggcatttgggggcaggggttgagtaggaaatcatgcttttaaacagaattgtgtctcaatatgttgcagttactgtcgttattagtttctaagttatcctgtctggaacaagtaggaacaccattgggttggcatctgagtcctattgggaggaccccttacgtctttgataactttctggcattctggtatgatggagtgttccaggtttatctttatgtttcctgccttttctctgtgaagccttgattacttgtagtgggaaatgatatttagtgaccagaatctaagcatgagttgtgtttatggtcattgcacaccacgatgcagtggttcttggttggtcattattttttagccctttttggggacagagctaggtggttttcttttaagataaactaatgaattgatactgatagttccaactcaaattcagtatcagtactacagggtttttatttattggtcgatgtactttcacataaaattttctgtgcctgttgtttctaaaaagaaacgtgctgcagaagtgttcctgtgggttaaactaatctatactaggaagctagccaggcctgggaaggctgtgtgaaaagaacagtaatccccaggacttggggatttaccatgaaacagcatgaaagctggaaggggcctttgagaatgtagagttcagtggcacccgtacctgcgtgttcgttagagttttctaggaagcaaagtctcctcaccctagatctacatgatcaggatctccaaggtaggagctaggtgtctacttctgtcaaggttatttatgaagaaattgatggttagacatgttcagaatcagatcatgaggacactaattcttccggaaatcccttaacactaaattgatgtttcgatgggttaaatgctttggctgagatcacatagccaaggtagaaccaaagccctccaaatcaatgctgccctcctgaaacacagatctcataatacacccattgtgcatctcctcagcttaaaaaggaggaccgctgatgtgcatcacggaagatttccatcacatcatggtgactggagatttatatagtgcttgcagtatactttggttacttttacgttgagatctgctaccatggaatacagtccagataaccacagtgccaaagtaggttaaagagggtctggaattgccgcttgaactagtgaggcagaaaagttgggaatctggagtgcatggtagaaggaagaccacttcaacagaagaggagaacaattgctgttatagaatcctatataggactactagaaacctaaactccagtgcatgagtggagcccagcatccagaatgccaagcagctttctgagatgctggcatcaggggtgcctctttcaccaggtgtcatggttctctgtccatgtcagtacagaactccagcctctgggaggggaagctaagaagagaaaagcaggtcctcagacaaggcacagttcttccttctccctcacagagatcatagtctcctggagagacaaaaggctatgaaaggagaagaatcagactcttagttgggtactgtgaagggctttccaaaacagataatatccccaagtatgaggccccagagacctggtgaaaagaaaccttaggaactagagacaaaggctaaagaggtccccagacaggcagccaaccctcctcccattaagattgcccaataattttaaccattttggctgccagacactgggcagcataagcctatttcctagccctttagctgagaaacaccaaggtgggactgccattggccattggctccagggtgggacagggctgtcattgtgaatgctaggatcagacaggacaggccgagatgagctactagactaggagccatgactggagtcagcaaagaaacctgcttcacctgatgttgagtccagggctgttcggtagattccaccagtacctaaaagtcatagactcccacctaggtgttacattgcaagtcatggagaactccaatcctcagctgttacagagaagcattctttgcaaagaagagcacaggcactggagtcagattgcctgggttcaaatcccacccggtctacataatactgagtcacttctctgtacctcagttccttcacctataaaacagagataacagaagtatcgactttatattgagatgtcgccaaatatgaaatgacgaagtaggcagagcccttagcgcacagcctactgagggatgagtattcactgttagctatttttactattaatacttctgtaattgccaccagtaatgatcgctgttgcctcccttcctgccagtactgtatctggacggatggactgaatgcgctactcgggaaggacatgatgagcgacctgacgcggaatgacctggacaccctgctcagcatggaaatcaagctccgcctcctggacctggaaaacatccagatccctgacgcacctccgccgattcccaaggagcccagcaactatgacttcgtctatgactgtaactgaagtggccgggcccagacatgccccttccaaaactggaacacctagctaacaggagagaggaatgaaaacacacccacgccttggaaccgtcctttggtaaagggaagctgtgggtccacattcccttcagcatcacctctagccctggcaactttcagcccctagctggcatcttgctcaccgccctgattctgttcctcggctccactgcttcaggtcacttcccatggctgcagtccactggtgggacaagagcaaagcccactgccagtaagaaggccaaagggcccttccatcctagccctctgcaggcatgcccttccttcccttgggcaggaaagccagcagccccagactgcccaaaaacttgcccaccagaccaagggcagtgccccaaggcccctgtctggaggaaatggcctagctatttgatgagaagaccaaaccccacatcctcctttcccctctctctagaatcatctcgcaccaccagttacacttgaattaagatctgcgctcaaatctcctcccacctctctccctgcttttgccttgctctgttcctctttggtcccaagagcagcagccgcagcctcctcgtgatcctccctagcataaatttcccaaacagtccacaggtcccatgcccactttgcgtctgcactgtgatcgtgacaaatcttccctcctcaccagctagtctggggtttcctctccctgccccaggccagaactgccttcttcatttccacccacgctcccagcctcttagctgaaagcacaaatggtgaaatcagtagtctcgctccatctctaatagactaaacctaaatgcctctaggacggactgttgctatccaagcgtttggtgttaccttctcctgggaggtcctgctgcaactcaagttccacaggatggtcaagctgtcagacatccaagtttacatcattgtaattattactggtatttacaatttgcaagagttttgggttagttttttttttttttttgctttgtttttgtacaaaagagtctaacattttttgccaaacagatatatatttaatgaaaagaagagatacataaatgtgtgaatttccagtttttttttaattattttaatcccaaacatcttcctgaaaataacattcccttaaacatgctgtggaataaaatggattgtgatgatttggggagctggtgttttgatttagtaacttaggttcttgctactcagtcatcagcatcacctgggagcttgttggagatgccagctcttcagctccaccctagacctgctgaattgggtgatgtttatgtacattggtttgaaaaacactgctgtgggaaaccctccaccattgctaggtcaccataggctctgagcatcagtggagaatgttacttctaagaagaccatctcgactcactgagaaaatcagacccactgtatgaaaatatctattccttttacattgctgtctcttgaccatgactttctcttttttctttcttaccatgatataatttatagaatgggtctaattaaagacatcacaactttgagggagcacatttagcaatgaaaagaatgcatacccacagacctgaaataagccagaactaaataaatctaaccgtgggttaataaattataggtcagagcccagcgaaggatgtttcttaagtcatttgcactggaggcattatcaggattgtaaactcccagcactgggagggatgtcagaagggtccaagcatgcagtattaagcgtggcacagcaccagccactctggcctcacagcacaagctgtggaagcatccaggtcatttctctttaccgtcatcaggatgtgcaattacagattgacctgggttgagatgatatggtccagagcactgcatgcattgcaggaaaaaagtcctttgcattcacaggggttccttcttcccatcagagcactcacacctgtgtcaagctgttaattccttgatcattaagcttcgatgttattaacatgtacttgctatcaggagcagttattaatctacccatcatcatgataaaacagtaagtgttaggtcaaaggcagcaaacaaagtcatattatttttttcttatgggttacaagatccaatccatgaaaaagggaactttctggaccaggatctctgaggtcctgagacactgggtttaagaaatgtatctgtcctgtgaccttggttggggagatccagcccctctctcttctggcactccagctttggtgcatttaatagaaagaaaccttttcaggactatgaaaggcagcattctccagctcctccctagaccctcctttggacctgtgagatctgaagagtatgccatctgtttccattcattttgtgaccatgtggggaaggattgttgcccatatttggccacctcaccttctctctccaggctgcccaaggctttttttcccatgcaatgagcctaccacctccaactcatctcctgttgcctgcagtttcctaagcctgggcaactcagccaaatccaaggcagaagtaaagtaggaagactgatgttgtcgtgaagtccaagttgcattctgctattcatattactcaaaataaaactgattacttaatttgaatctgctgatgtttaaattcctctcttattcttgttcagaacacataagaggaaggagaattaactggcctctgaaacctctgtgacaacatttaagggcagggaaagctaatagtaattgcaaaagaaaaagtgcaaggctgaatgtttcttgagtctatttgcaagtccgttctaagccatccttcagttatcacctacagcatgtcctgtccacctgcttttacaatgaacaaagcaatgggtgtccccaatgacatgcataccagtcatccattttgttttagttatgaaaatacaattaacacaatcctttcattttaaggggaaatgaaatatccattcaataatcaaaagtgtgcttagagataggccctaggaactcaacaagaacaaaatttgtaaaattgagatttgtaaaaatgagaacaaaattcatcaaatcagggaaatgacaagcaacttagtcaaatataaaaccgaaaagttgcagcacagtgtggtaaatagcattatataaatatgtacaaggtagaatagtagaaaggaggttgtgaccaacactttccaaaatggtataagggaaagcaagagaggagtagaaacttgagtaagatcttgaaaaagggatgttcaccatgtaagagagaaacctaagtagagtagagagtgtgaacaaagcatggaggcggctgatctggaacgactcaggaatctgtaggtcattcagtgtggctgctgtgccggatgcatatgagagagcaaagggtgataacactgcagaggaagaaaagcacagatcatgaaaatcctgacagagttggcaaggacgtttacttgcgggcaaaagagagtgcattaagaggtgtgatgtcagatttgccattcagaagtatcacagatacaaaacagccttgtgggggcaagcttgaagtgggagaaaactggaagcagaaatattagcaaggagatttttgaaataatcccaaccagcattatttgagcttagactttggtagtagtaatagaaatggggaggagggtaaagttattaaagaggcagaatgagctggaagcggagacctcattagcatgggggtaagagagagagagtgcagaggactcctgagctcctagaagaggtaagagagagggctgtgagcaaaaatcaggaagagaggaggaacagaagagtttaggaaatgataatgagatgaaataatgagatagtgtgcatttggtggacttctccaaacagaaagataatttgaggcaagtcatttactgtgtgcctgttactcatttatataatggaaatgttattacttgtgaggattatacatgaggtgactgaaaactgtcagtgctcaaaaaggaaatcccctgccctccccgtcccttccctttccttcctttcctctgtcatccacggtggtttgagggtgggatctttagcatagcttaaactagaagatatgcgatcaatccctccagatccatgggggattggttccaggagcctttggataccgaaacccaggatgctcaagtcccttatataaaatggcatcatatttgcatataacctatgcacatcctcctgtatattttatatcatctctagactgtttataatacctaatacaatgtcagtgctatacaaatggtttagactctatcattttcaaagtttagagtttgtattgtgttttttattgtttatttccccaaatattttcagtctcagttggttaaatctgaggatgcagaacctgtagatatgaaggaccatttttcaaccaattcagtctgttttacggtaaagaaaaatgagaaagagaaaggaagagtggaaaatttaagaattttgatatacttcttgaattaaggattggaggtaatgcaataaaaccacaatttaagataaattccagtggggaggtagcgtgtatgctataaacccatataaaaatataattataccctaatcacttaaggcattagaaagaggaaactttcatggctggagaacagagaggaatatgggagagagaatagaagataagatgggaaaaaaggtaaagaatcttgactgtcttgccaagaagttggaaatatattctttatgtgatcaagagccactgacatattttacctgggtaaatggcatgaccagatttgcattttaagatcacgactgtcacacaggcagcagcacaaaagaagagtcgtggaagggtgggactggaggctgagtatgtgtcaaaaatgcttcacttttaaagaaggctgaatatcaatcattcagtcaatcaaattattggaagcaaatggaatccaacagagattatatacagggtgctgtagaagagacgaaacttgatcaccattgcaaaagacagcaaaatagaagtctatatagttagcccttgaacaatatgggagttaggggtatcaactgccagcacagtcaaataatccaagtataacttttgacttcccaaaaccgtaactactaatagcctacctttgatcagaagctttactgataatataaacaatcaattaatacatattttgtatattatttgtatcatatacagtattcttaaagctagagaaaagaatgctattaaaatcataagagaaaatatatttgctatttattaatattaagttgaagtggatcactaataaggtcttcatcctcatcatcttcacattgagtaggctgaagaggaggggttggtcttgctgtctcggggtgatagaggcagaaggaaatccacataaaaatggacttgcacagttcaaacctgtgttgatcaagggtcaactgtattttcaaagttcaatatataaatacaaaaatagaagtaagaccaaatctttctcagactggctgaaaaagcaaaatctggacaaatgctggttacaagatatgtgcctaagacaaaatgacacacaataattgcaaatacagagttgagcaagaaataccagcaaatgcaaagtcccactgcaatgagtggagagaggaggtggtggggaaggagcaaataaacagcaggcaaaataaaattgaaaatacaaagataggaaaaagaaagttattttataatacagatggtcctcaactcgcaacagagttgcatcccaataaaccttttgtaagttgaaaatatcttaagtcaaaaatgcatttaatatacctacctactgaacatctgagcttagcctagcctaccttaaatgtgctgaaaacacattagcctactgggcaaaatcagctaacacaaaacctgttttataagaaagtgttggatatctcatatactgcatattgcaagcccaggagaagatcaaaattcaaaatttgaagtacattcaaattgcaacagtttcacaccatcacaaagtcaaaaaatctaggtgaaccattgtaagttgcagaccctctgtactctttcacgttgatactttttttcatgtctctgtctgtgtgctaaataaaatagaatattttattcatcaataatatctacatgctaaataaaatcaccttgaaatatataaaccaaaactattatatatagaagagaagtgatgagcaccattccttaggtagagacttcaaataatggcatatatatgattaactgaatttgaaagatgttttggatcccttctctacaaaaaatttaaaaagccagacatggtggtgcatgcctgtagtcttagctactcttagctacttagctgaggcaggaggattgctcgagcctaggagtttaagcctgcagtgaaccgtgaccgagtgactgcactccagcctgggcaacagattgagaccctgtatccaaaaaaaaaaaaaaaaaaaaagagagagagagaaataaaaaataaagatgtttggatatacatagtctacaaaaaatatacataatatatctttggaaaacgttcctcatatagatggccacaaagaaaatctttacaccataagacagaatttaagtataaagaacttctggtttcatagcaatacccaaaacatcctccccaaaacaattatttcaaatgtggctaaaaatttaaaacaataaaaatcattttaaatgatttccctgatcttctattacaaaaagggaaatccacacgtgtcagtgatgaggaaagaactgaaatccaaagcactaaacttgtggctgaggctgtggcctccccagggtgttagttgtcttgagagaggtgtaagttctagtgtccaggtggggaatttagagaccagacctcatttgcatattaattaggaagagaactgatgtcttcccataaaagccaggatcttaagacggctacaccctcatttgcaagttagatggggggggaaaaagaaacctaaccattgtcacaagaagctaacatgaaatcttctctgactaggctgtgggagaaaaaagactcacaatctataatgagtaagagtaagattagataccccaaaacttgacataatggaataaaaacatgaaaataaaataaagtgcctgccttggcctcccagagtgctgggattacaggtgtgagccaccacgtctggcctgaggtaaacatattttaaatagaattgaaatccccagaacaataaagagatgacaaaagcagtaaaacatgaaaaatacagtcattggaaaaatgaactccgtatcacgttaaatataggttagacacaactgaagagagaattaatgagctgaaagactgatctgagaaaaattacccaaaaggccatgcaaagaattgagaaaaaaaattgactgttaggcagcttgaaggtgagaactctaatagaagttccaaaacgaaagaagagcaaatggtggaaatgcagtatttcaaggaataatggctgaagattttccagtaaaacaaatccttagatttggaaatataaaaagtcccaagcaagataagtaaatatgcattgataaaaatcacagtgacactgaaaaacaccaaagacagagaaaatgtgaaatacctagagagaaagacgatcaccttcacaggaagtgttacactaacagaggttgctacttcagtagcaacaatggaagaggacgctgagtaatttttttttaatatactttaagttctgggatacatgtggagaacgtgcggtttgtgacataggtatacacgtgccatggtggtttgctgcacccatcaacccatcacatacattaggtatttctcctaatgctatccctcccctagtcccccaccccccactacaggccctggtgtgtaatgttaccctccctgtgtccatgcgttctcatagttcaactcccacttattattgagaatatgtggtgtttgattttctgttcctgtgttagtttgctgagaatgatgctttccagcttcatccacgtctctgcaaaggacacaaacgcattctttcttatggctgtatagtattccatggtgtatatgtgccacatttttttaatcgagtctatcactgatgggcatttgggttgattccaagcctttgctattgtgaatagtgctgcaataaacatatgtgtgcatctgtctttatagtagaatgatttataatcctttgggtatatacccagtaatgggattgctgggtcaaatggtatttctggttctagatccttgaggagttgctacactgtcttccacaatggttgaactaatttacactcccaccaacagtgtaaaagcattcccatttctccacacgctctccagcatctgttgtttcctgactttttaatgatcgccattttaactggcgtgagatggtatttggcatggtggttttgatttgcatttctctaatgaccagtgatgaggagctttttttcatgtttgttggccacataaatgtcttcttttgagaagtgtctgttcatatccttctcccactttttgatggagtagtttgttttttcttgtaaatttgtttaagttctttgtagattctggatattagccctttgtctcatgcatagactgcaaaaattttctcccattatgtaggttgcctgttcactctgatgatagtttcttttgctgtgcagaagctctttagtttaattagatcccatttgtcaattttggcttttgttgcaattgcttttggtgttttagtcatgaagtctttgcccatgcctatgtcctgaatggtattgcctaggttttttctagggtttttatggttttagatcttacacttatttaatccatcttgagttaattttcatataaggtgtaaggaaggggtccagttttggttttctttatatggctagccagttttcccaacattatttattaaatagggaatcctttctccattgctcgtttttgtgatgtttgtcaaagatcagatggttgtagatgtgtggcattatttctgaggcctctgttctgttccattggtctatatatctgttttggtaccagtaccatgctcttttggttactgtagccttgtagcatagtttgaagtcaggtagcatgatgcctccagttttgctcttttcgcataggattgtcttggttatttgggctcttttttggtttcatatgaaatttaaagtagttttttctaattctgtgaagaaagtcaatggtagcttgatggggatggcattgaatctataaattactttgggcagtttggccattttcatgatattgattcttcctatccatgagtatggaatgtttttccatttgtttgtgtcctctcgtatttccttgagcagtggtttgtagttctccttgaagaggtccttcatatcccttgtaagttgtattcctaggtattttattctctttgtagcaattgtgaatgggagttcactcatcatttgactctatgtttgtctgagtatttttatgtcacagcatacgttgaaagttatgatgcctgtacaacacacgagggtaggcagataaggctgctcaccaggaagggccacagcccaagccctgccctgacaccctgacaaccaggccatcaattcttctgcataccagtgaccagtccacagtgcactgcaatgaggagagaggtatgcaccgcagcacccgtggagaggctctggaatggaggtctgatcatatgttttcatagcattgagagaagataattttaagtagaattgtattcccagttaaactgtcactcaagaatggaaacaaaataaagacatttccaacaaggttaaagggaatttgtcactcacagatgatctctaagagtaagggaaagaaggataattttgaaagtaattctaaaccagaaatagctgtgtaaaagacacaataataataactaatttaaagtgtgttaagttttaacacaccttataactaataataactaatttaaggtgtcttaaaactatgtggaattaaaatacagaagaatgtaacgtacaacaaaaacatataacgtaacctaaagtactttaacctccttttacttttcagaagcttagagatactgataatctttagactttaaatcaactctacatgttaaaaattggggaataactattgaaaatattagaaacaaaatgtgtgacttctctatcaacagaagaggaaaaagataaagaaaattaaattaattcaataataaataaataagaaaaaatgaatgctttagtgaaaaatgtgaaaaggaaataaacaggcaattaacaaaatatcagtataaatgaccaggggaataattgaaaaaaaataccatcaaaaaaacttgaagaaatacacattaaaatgatacatgtttttggcctttcaacttggcaaatttttgtatgattaaagattatttctcttaatgtataagtggtatttaaaaatcaaaaaacacaataattcagcatagtataatccaaaataaatgtggatttaaaatagtaagtaaattctgtatgaataagcaaagaaatcaataaacaaaggaaatgtttaagatcacagataatattaaaaggcacattaacatcataagacaaaatttgagaacatttttaaaatattccatgatggtgaaagggtaataaaacaggctctcacaatctctctggaaaaaaatttggtaatatacagccaaagttttcaaaatatgactgactcttgactttgcaattttactcatcaaatggagctgctctgtttgttttgtttatctgtttatttgctacgccccatgtatgattttgtttcatgaaaggattccagtgtttaaaataaaattgtaaaacctcaggctaaaataaactatgagacatccatttataccttgacacacatgactaacattcataatcatgtgaagtggcccgttgaaaggaaagatgttaataagatgttaactgaaaaaaatagctcataaaactgtatgaaaatgtatatggattttattttagaatgtcagtgtgtgtgttgtatatatgcctagaaaagcattcagaaggatatacaccaatgtgttttttagttttagtttttgtttttgttttgttttgtttgaaacagagtctcactctgtcatgcaggctggagtgcagtggggcgatctcagctcaccgcaacctctgcctccagggttcaagtgattctcctgcctcagtctcctgagtagctgggattacaggcgcccaccaccatgtccagctaatttttgtatttttagtagagacag

SEQ ID NO: 1588 - DNA, 2751 bp, Homo sapiens
aggtggaggctgatgaatatgaactatctccagcccatcaccagctttttctttttcttcttgtccttatttgttttttagttctttataagaaaaagtgggggatatattgagaagtaccaagacggggagctatgggtttattgacaaaagagcataggacactaaaatagaaacgaagttattatttttctcttgtgatactctaagagaaaagctcttcctggaaaagccgatgatctctgaagatgctaaataaatgagcaggagtttccctgaaatggaggcgccctttgattggctgatctttccccgactcctgccaatcggagcatccctgggctccagctccataaacataagcaaagctacatgcttattcttctggacttggagtgtataccatttaaaggtgtgcggcgggtctctgttcacatggctcaactggaaacctgtttcatgaacaagcttactcaggaaccatctggtggtattccagcacattgttcttcagggggacgactctaagtcgctttgtggtggcagcagcttagaatcagtatttgtggttgggaaagatggacttacgggagcttggtaatgcaggtggtgaaggagcaggttatgagagcacttacaaccaagcctagctccctggaccagttcaagagcaaactgcagaacctgagctacactgagatcctgaaaatccgccagtccgagaggatgaaccaggaagatttccagtcccgcccgattttggaactaaaggagaagattcagccagaaatcttagagctgatcaaacagcaacgcctgaaccgccttgtggaagggacctgctttaggaaactcaatgcccggcggaggcaagacaagttttggtattgtcggctttcgccaaatcacaaagtcctgcattacggagacttagaagagagtcctcagggagaagtgccccacgattccttgcaggacaaactgccggtggcagatatcaaagccgtggtgacgggaaaggactgccctcatatgaaagagaaaggtgcccttaaacaaaacaaggaggtgcttgaactcgctttctccatcttgtatgactcaaactgccaactgaacttcatcgctcctgacaagcatgagtactgtatctggacggatggactgaatgcgctactcgggaaggacatgatgagcgacctgacgcggaatgacctggacaccctgctcagcatggaaatcaagctccgcctcctggacctggaaaacatccagatccctgacgcacctccgccgattcccaaggagcccagcaactatgacttcgtctatgactgtaactgaagtggccgggcccagacatgccccttccaaaactggaacacctagctaacaggagagaggaatgaaaacacacccacgccttggaaccgtcctttggtaaagggaagctgtgggtccacattcccttcagcatcacctctagccctggcaactttcagcccctagctggcatcttgctcaccgccctgattctgttcctcggctccactgcttcaggtcacttcccatggctgcagtccactggtgggacaagagcaaagcccactgccagtaagaaggccaaagggcccttccatcctagccctctgcaggcatgcccttccttcccttgggcaggaaagccagcagccccagactgcccaaaaacttgcccaccagaccaagggcagtgccccaaggcccctgtctggaggaaatggcctagctatttgatgagaagaccaaaccccacatcctcctttcccctctctctagaatcatctcgcaccaccagttacacttgaattaagatctgcgctcaaatctcctcccacctctctccctgcttttgccttgctctgttcctctttggtcccaagagcagcagccgcagcctcctcgtgatcctccctagcataaatttcccaaacagtccacaggtcccatgcccactttgcgtctgcactgtgatcgtgacaaatcttccctcctcaccagctagtctggggtttcctctccctgccccaggccagaactgccttcttcatttccacccacgctcccagcctcttagctgaaagcacaaatggtgaaatcagtagtctcgctccatctctaatagactaaacctaaatgcctctaggacggactgttgctatccaagcgtttggtgttaccttctcctgggaggtcctgctgcaactcaagttccacaggatggtcaagctgtcagacatccaagtttacatcattgtaattattactggtatttacaatttgcaagagttttgggttagttttttttttttttttgctttgtttttgtacaaaagagtctaacattttttgccaaacagatatatatttaatgaaaagaagagatacataaatgtgtgaatttccagtttttttttaattattttaatcccaaacatcttcctgaaaataacattcccttaaacatgctgtggaataaaatggattgtgatgatttggggagctggtgttttgatttagtaacttaggttcttgctactcagtcatcagcatcacctgggagcttgttggagatgccagctcttcagctccaccctagacctgctgaattgggtgatgtttatgtacattggtttgaaaaacactgctgtgggaaaccctccaccattgctaggtcaccataggctctgagcatcagtggagaatgttact

SEQ ID NO: 1589 - protein, 239 aa, Homo sapiens
MQVVKEQVMRALTTKPSSLDQFKSKLQNLSYTEILKIRQSMNQEDFQSRPILKEKIQPEILIKQQRLNRLVEGTCFRKLNARRRQDKFWYCRLSPNHKVLHYGDLEESPQGEVPHDSLQDKLPVADIKAVVTGKDCPHMKEKGALKQNKEVLELAFSILYDSNCQLNFIAPDKHEYCIWTDQALLGKDMMSDLTRNDLDTLLSMEIKLRLLDLENIQIPDAPPPIPKEPSNYDFVYDCN

SEQ ID NO: 1590 - DNA, 1884 bp, Homo sapiens
gctcatcgaagtcatgctctgcacacatattatttatagcagatctgaggcatgcatggtgtttgacatttctgtcttttaagtagggggacttcaaaaagtcgtgggcatccccctaggcaaagtgcagtgggcagggaccaggcagggtgcgggcgcaaggcgaacgcgcagaccacgagtgtcctggcgcaggtgccgggggcggcggctgcaactccgcagcgtccgctcgggaggagagttcgcggctgatctccggatgccttgcagatgcaaaatgtgtctctggccagcaggaggaaggaagaggaagtgagagcagcggcagccggcggtgcagcagccggccgacccagagtgtatagacacgtgtggccgtttacgctgtaggatcctcattcccactggctttgaacattttggggacttacaatgccgccacccgcggacatcgtcaaggtggccatagaatggccgggcgcctaccccaaactcatggaaattgatcagaaaaaaccactgtctgcaataataaaggaagtctgtgatgggtggtctcttgccaaccatgaatattttgcactccagcatgccgatagttcaaacttctatatcacagaaaagaaccgcaatgagataaaaaatggcactatccttcgattaaccacatctccagctcagaacgcccagcagctccatgaacgaatccagtcctcgagtatggatgccaagctggaagccctgaaggacttggccagcctctcccgggatgtcacgtttgcccaggagtttataaacctggacggtatctctctcctcacgcagatggtggagagcggcactgagcgataccagaaattgcagaagatcatgaagccttgctttggagacatgctgtccttcaccctgacggccttcgttgagctgatggaccatggcatagtgtcctgggatacattttcggtggcgttcattaagaagatagcaagttttgtgaacaagtcagccatagacatctcgatcctgcagcggtccttggccattttggagtcgatggtgctcaatagccatgacctctaccagaaagtggcgcaggagatcaccatcggccagctcattccacacctgcaagggtcagatcaagaaatccaaacctatactattgcagtgattaatgcgcttttcctgaaggctcctgatgagaggaggcaggagatggcgaatattttggctcagaagcaactgcgttccatcattttaacacatgtcatccgagcccagcgggccatcaacaatgagatggcgcaccagctgtatgttctacaagtgctcacctttaacctcctggaagacaggatgatgaccaaaatggacccccaggaccaggctcagagggacatcatatttgaacttcgaagaattgcttttgatgctgagtctgaacctaacaacagcagtggcagcatggagaaacgcaagtccatgtacacgcgagattataagaagcttgggttcattaatcatgtcaaccctgccatggacttcacgcagactccacctgggatgttggctctggacaacatgctgtactttgccaagcaccaccaagatgcctacatccggattgtgcttgagaacagtagtcgagaagacaagcatgaatgtccctttggccgcagtagtatagagctgaccaagatgctatgtgagatcttgaaagtgggcgagttgcctagtgagacctgcaacgacttccacccgatgttcttcacccacgacagatcctttgaggagtttttctgcatctgtatccagctcctgaacaagacatggaaggaaatgagggcaacttctgaagacttcaacaaggtaatgtggatc

SEQ ID NO: 1591 - protein, 481 aa, Homo sapiens
MPPPADIVKVAIEWPGAYPKLMEIDQKKPLSAIIKEVCDGWSLANHEYFALQHADSSNFYITEKNRNEIKNGTILRLTTSPAQNAQQLHERIQSSSMDAKLEALKDLASLSRDVTFAQEFINLDGISLLTQMVESGTERYQKLQKIMKPCFGDMLSFTLTAFVELMDHGIVSWDTFSVAFIKKIASFVNKSAIDISILQRSLAISMVLNSHDLYQKVAQEITIGQLIPHLQGSDQEIQTYTIAVINALFLKAPDERRQEMANILAQKQLRSIILTHVIRAQRAINNEMAHQLYVLQVLTFNLLEDRMMTKMDPQDQAQRDIIFELRRIAFDAESEPNNSSGSMEKRKSMYTRDYKKLGFINHVNPAMDFTQTPPGMLALDNMLYFAKHHQDAYIRIVLENSSREDKHECPFGRSSIELTKMLCEILKVGELPSETCNDFHPMFFTHDRSFEEFFCICIQLLNKTWKEMRATSEDFNKVMWI

SEQ ID NO: 1592 - DNA, 4026 bp, Homo sapiens
gctcatcgaagtcatgctctgcacacatattatttatagcagatctgaggcatgcatggtgtttgacatttctgtcttttaagtagggggacttcaaaaagtcgtgggcatccccctaggcaaagtgcagtgggcagggaccaggcagggtgcgggcgcaaggcgaacgcgcagaccacgagtgtcctggcgcaggtgccgggggcggcggctgcaactccgcagcgtccgctcgggaggagagttcgcggctgatctccggatgccttgcagatgcaaaatgtgtctctggccagcaggaggaaggaagaggaagtgagagcagcggcagccggcggtgcagcagccggccgacccagagtgtatagacacgtgtggccgtttacgctgtaggatcctcattcccactggctttgaacattttggggacttacaatgccgccacccgcggacatcgtcaaggtggccatagaatggccgggcgcctaccccaaactcatggaaattgatcagaaaaaaccactgtctgcaataataaaggaagtctgtgatgggtggtctcttgccaaccatgaatattttgcactccagcatgccgatagttcaaacttctatatcacagaaaagaaccgcaatgagataaaaaatggcactatccttcgattaaccacatctccagctcagaacgcccagcagctccatgaacgaatccagtcctcgagtatggatgccaagctggaagccctgaaggacttggccagcctctcccgggatgtcacgtttgcccaggagtttataaacctggacggtatctctctcctcacgcagatggtggagagcggcactgagcgataccagaaattgcagaagatcatgaagccttgctttggagacatgctgtccttcaccctgacggccttcgttgagctgatggaccatggcatagtgtcctgggatacattttcggtggcgttcattaagaagatagcaagttttgtgaacaagtcagccatagacatctcgatcctgcagcggtccttggccattttggagtcgatggtgctcaatagccatgacctctaccagaaagtggcgcaggagatcaccatcggccagctcattccacacctgcaagggtcagatcaagaaatccaaacctatactattgcagtgattaatgcgcttttcctgaaggctcctgatgagaggaggcaggagatggcgaatattttggctcagaagcaactgcgttccatcattttaacacatgtcatccgagcccagcgggccatcaacaatgagatggcgcaccagctgtatgttctacaagtgctcacctttaacctcctggaagacaggatgatgaccaaaatggacccccaggaccaggctcagagggacatcatatttgaacttcgaagaattgcttttgatgctgagtctgaacctaacaacagcagtggcagcatggagaaacgcaagtccatgtacacgcgagattataagaagcttgggttcattaatcatgtcaaccctgccatggacttcacgcagactccacctgggatgttggctctggacaacatgctgtactttgccaagcaccaccaagatgcctacatccggattgtgcttgagaacagtagtcgagaagacaagcatgaatgtccctttggccgcagtagtatagagctgaccaagatgctatgtgagatcttgaaagtgggcgagttgcctagtgagacctgcaacgacttccacccgatgttcttcacccacgacagatcctttgaggagtttttctgcatctgtatccagctcctgaacaagacatggaaggaaatgagggcaacttctgaagacttcaacaaggtaatgcaggtggtgaaggagcaggttatgagagcacttacaaccaagcctagctccctggaccagttcaagagcaaactgcagaacctgagctacactgagatcctgaaaatccgccagtccgagaggatgaaccaggaagatttccagtcccgcccgattttggaactaaaggagaagattcagccagaaatcttagagctgatcaaacagcaacgcctgaaccgccttgtggaagggacctgctttaggaaactcaatgcccggcggaggcaagacaagttttggtattgtcggctttcgccaaatcacaaagtcctgcattacggagacttagaagagagtcctcagggagaagtgccccacgattccttgcaggacaaactgccggtggcagatatcaaagccgtggtgacgggaaaggactgccctcatatgaaagagaaaggtgcccttaaacaaaacaaggaggtgcttgaactcgctttctccatcttgtatgactcaaactgccaactgaacttcatcgctcctgacaagcatgagtactgtatctggacggatggactgaatgcgctactcgggaaggacatgatgagcgacctgacgcggaatgacctggacaccctgctcagcatggaaatcaagctccgcctcctggacctggaaaacatccagatccctgacgcacctccgccgattcccaaggagcccagcaactatgacttcgtctatgactgtaactgaagtggccgggcccagacatgccccttccaaaactggaacacctagctaacaggagagaggaatgaaaacacacccacgccttggaaccgtcctttggtaaagggaagctgtgggtccacattcccttcagcatcacctctagccctggcaactttcagcccctagctggcatcttgctcaccgccctgattctgttcctcggctccactgcttcaggtcacttcccatggctgcagtccactggtgggacaagagcaaagcccactgccagtaagaaggccaaagggcccttccatcctagccctctgcaggcatgcccttccttcccttgggcaggaaagccagcagccccagactgcccaaaaacttgcccaccagaccaagggcagtgccccaaggcccctgtctggaggaaatggcctagctatttgatgagaagaccaaaccccacatcctcctttcccctctctctagaatcatctcgcaccaccagttacacttgaattaagatctgcgctcaaatctcctcccacctctctccctgcttttgccttgctctgttcctctttggtcccaagagcagcagccgcagcctcctcgtgatcctccctagcataaatttcccaaacagtccacaggtcccatgcccactttgcgtctgcactgtgatcgtgacaaatcttccctcctcaccagctagtctggggtttcctctccctgccccaggccagaactgccttcttcatttccacccacgctcccagcctcttagctgaaagcacaaatggtgaaatcagtagtctcgctccatctctaatagactaaacctaaatgcctctaggacggactgttgctatccaagcgtttggtgttaccttctcctgggaggtcctgctgcaactcaagttccacaggatggtcaagctgtcagacatccaagtttacatcattgtaattattactggtatttacaatttgcaagagttttgggttagttttttttttttttttgctttgtttttgtacaaaagagtctaacattttttgccaaacagatatatatttaatgaaaagaagagatacataaatgtgtgaatttccagtttttttttaattattttaatcccaaacatcttcctgaaaataacattcccttaaacatgctgtggaataaaatggattgtgatgatttggggagctggtgttttgatttagtaacttaggttcttgctactcagtcatcagcatcacctgggagcttgttggagatgccagctcttcagctccaccctagacctgctgaattgggtgatgtttatgtacattggtttgaaaaacactgctgtgggaaaccctccaccattgctaggtcaccataggctctgagcatcagtggagaatgttact

SEQ ID NO: 1593 - protein, 717 aa, Homo sapiens
MPPPADIVKVAIEWPGAYPKLMEIDQKKPLSAIIKEVCDGWSLANHEYFALQHADSSNFYITEKNRNEIKNGTILRLTTSPAQNAQQLHERIQSSSMDAKLEALKDLASLSRDVTFAQEFINLDGISLLTQMVESGTERYQKLQKIMKPCFGDMLSFTLTAFVELMDHGIVSWDTFSVAFIKKIASFVNKSAIDISILQRSLAISMVLNSHDLYQKVAQEITIGQLIPHLQGSDQEIQTYTIAVINALFLKAPDERRQEMANILAQKQLRSIILTHVIRAQRAINNEMAHQLYVLQVLTFNLLEDRMMTKMDPQDQAQRDIIFELRRIAFDAESEPNNSSGSMEKRKSMYTRDYKKLGFINHVNPAMDFTQTPPGMLALDNMLYFAKHHQDAYIRIVLENSSREDKHECPFGRSSIELTKMLCEILKVGELPSETCNDFHPMFFTHDRSFEEFFCICIQLLNKTWKEMRATSEDFNKVMQVVKEQVMRALTTKPSSLDQFKSKLQNLSYTEILKIRQSMNQEDFQSRPILKEKIQPEILIKQQRLNRLVEGTCFRKLNARRRQDKFWYCRLSPNHKVLHYGDLEESPQGEVPHDSLQDKLPVADIKAVVTGKDCPHMKEKGALKQNKEVLELAFSILYDSNCQLNFIAPDKHEYCIWTDQALLGKDMMSDLTRNDLDTLLSMEIKLRLLDLENIQIPDAPPPIPKEPSNYDFVYDCN

SEQ ID NO: 1594 - DNA, 4122 bp, Homo sapiens
gctcatcgaagtcatgctctgcacacatattatttatagcagatctgaggcatgcatggtgtttgacatttctgtcttttaagtagggggacttcaaaaagtcgtgggcatccccctaggcaaagtgcagtgggcagggaccaggcagggtgcgggcgcaaggcgaacgcgcagaccacgagtgtcctggcgcaggtgccgggggcggcggctgcaactccgcagcgtccgctcgggaggagagttcgcggctgatctccggatgccttgcagatgcaaaatgtgtctctggccagcaggaggaaggaagaggaagtgagagcagcggcagccggcggtgcagcagccggccgacccagagtgtaagtgcgtgtgctggggcgagcgggagcgggcgaggatgggcacaggatagaggcagagccacccacgccgccgcggccccacgctgggcgacagagcctccagttccccttcaatggtggcgggtcgccggagctctgatcgccgggaacccttgccgctgctgtcctgcgaccccaagcaggtatagacacgtgtggccgtttacgctgtaggatcctcattcccactggctttgaacattttggggacttacaatgccgccacccgcggacatcgtcaaggtggccatagaatggccgggcgcctaccccaaactcatggaaattgatcaaaaaaccactgtctgcaataataaaggaagtctgtgatgggtggtctcttgccaaccatgaatattttgcactccagcatgccgatagttcaaacttctatatcacagaaaagaaccgcaatgagataaaaaatggcactatccttcgattaaccacatctccagctcagaacgcccagcagctccatgaacgaatccagtcctcgagtatggatgccaagctggaagccctgaaggacttggccagcctctcccgggatgtcacgtttgcccaggagtttataaacctggacggtatctctctcctcacgcagatggtggagagcggcactgactttggagacatgctgtccttcaccctgacggccttcgttgagctgatggaccatggcatagtgtcctgggatacattttcggtggcgttcattaagaagatagcaagttttgtgaacaagtcagccatagacatctcgatcctgcagcggtccttggccattttggagtcgatggtgctcaatagccatgacctctaccagaaagtggcgcaggagatcaccatcggccagctcattccacacctgcaagggtcagatcaagaaatccaaacctatactattgcagtgattaatgcgcttttcctgaaggctcctgatgagaggaggcagcatgtcatccgagcccagcgggccatcaacaatgagatggcgcaccagctgtatgttctacaagtgctcacctttaacctcctggaagacaggatgatgaccaaaatggacccccaggaccaggctcagagggacatcatatttgaacttcgaagaattgcttttgatgctgagtctgaacctaacaacagcagtggcagcatggagaaacgcaagtccatgtacacgcgagattataagaagcttgggttcattaatcatgtcaaccctgccatggacttcacgcagactccacctgggatgttggctctggacaacatgctgtactttgccaagcaccaccaagatgcctacatccggattgtgcttgagaacagtagtcgagaagacaagcatgaatgtccctttggccgcagtagtatagagctgaccaagatgctatgtgagatcttgaaagtgggcgagttgcctagtgagacctgcaacgacttccacccgatgttcttcacccacgacagatcctttgaggagtttttctgcatctgtatccagctcctgaacaagacatggaaggaaatgagggcaacttctgaagacttcaacaaggtaatgcaggtggtgaaggagcaggttatgagagcacttacaaccaagcctagctccctggaccagttcaagagcaaactgcagaacctgagctacactgagatcctgaaaatccgccagtccgagaggatgaaccaggaagatttccagtcccgcccgattttggaactaaaggagaagattcagccagaaatcttagagctgatcaaacagcaacgcctgaaccgccttgtggaagggacctgctttaggaaactcaatgcccggcggaggcaagacaagttttggtattgtcggctttcgccaaatcacaaagtcctgcattacggagacttagaagagagtcctcagggagaagtgccccacgattccttgcaggacaaactgccggtggcagatatcaaagccgtggtgacgggaaaggactgccctcatatgaaagagaaaggtgcccttaaacaaaacaaggaggtgcttgaactcgctttctccatcttgtatgactcaaactgccaactgaacttcatcgctcctgacaagcatgagtactgtatctggacggatggactgaatgcgctactcgggaaggacatgatgagcgacctgacgcggaatgacctggacaccctgctcagcatggaaatcaagctccgcctcctggacctggaaaacatccagatccctgacgcacctccgccgattcccaaggagcccagcaactatgacttcgtctatgactgtaactgaagtggccgggcccagacatgccccttccaaaactggaacacctagctaacaggagagaggaatgaaaacacacccacgccttggaaccgtcctttggtaaagggaagctgtgggtccacattcccttcagcatcacctctagccctggcaactttcagcccctagctggcatcttgctcaccgccctgattctgttcctcggctccactgcttcaggtcacttcccatggctgcagtccactggtgggacaagagcaaagcccactgccagtaagaaggccaaagggcccttccatcctagccctctgcaggcatgcccttccttcccttgggcaggaaagccagcagccccagactgcccaaaaacttgcccaccagaccaagggcagtgccccaaggcccctgtctggaggaaatggcctagctatttgatgagaagaccaaaccccacatcctcctttcccctctctctagaatcatctcgcaccaccagttacacttgaattaagatctgcgctcaaatctcctcccacctctctccctgcttttgccttgctctgttcctctttggtcccaagagcagcagccgcagcctcctcgtgatcctccctagcataaatttcccaaacagtccacaggtcccatgcccactttgcgtctgcactgtgatcgtgacaaatcttccctcctcaccagctagtctggggtttcctctccctgccccaggccagaactgccttcttcatttccacccacgctcccagcctcttagctgaaagcacaaatggtgaaatcagtagtctcgctccatctctaatagactaaacctaaatgcctctaggacggactgttgctatccaagcgtttggtgttaccttctcctgggaggtcctgctgcaactcaagttccacaggatggtcaagctgtcagacatccaagtttacatcattgtaattattactggtatttacaatttgcaagagttttgggttagttttttttttttttttgctttgtttttgtacaaaagagtctaacattttttgccaaacagatatatatttaatgaaaagaagagatacataaatgtgtgaatttccagtttttttttaattattttaatcccaaacatcttcctgaaaataacattcccttaaacatgctgtggaataaaatggattgtgatgatttggggagctggtgttttgatttagtaacttaggttcttgctactcagtcatcagcatcacctgggagcttgttggagatgccagctcttcagctccaccctagacctgctgaattgggtgatgtttatgtacattggtttgaaaaacactgctgtgggaaaccctccaccattgctaggtcaccataggctctgagcatcagtggagaatgttact

SEQ ID NO: 1595 - protein, 592 aa, Homo sapiens
MDAKLEALKDLASLSRDVTFAQEFINLDGISLLTQMVESGTDFGDMLSFTLTAFVELMDHGIVSWDTFSVAFIKKIASFVNKSAIDISILQRSLAISMVLNSHDLYQKVAQEITIGQLIPHLQGSDQEIQTYTIAVINALFLKAPDERRQHVIRAQRAINNEMAHQLYVLQVLTFNLLEDRMMTKMDPQDQAQRDIIFELRRIAFDAESEPNNSSGSMEKRKSMYTRDYKKLGFINHVNPAMDFTQTPPGMLALDNMLYFAKHHQDAYIRIVLENSSREDKHECPFGRSSIELTKMLCEILKVGELPSETCNDFHPMFFTHDRSFEEFFCICIQLLNKTWKEMRATSEDFNKVMQVVKEQVMRALTTKPSSLDQFKSKLQNLSYTEILKIRQSMNQEDFQSRPILKEKIQPEILIKQQRLNRLVEGTCFRKLNARRRQDKFWYCRLSPNHKVLHYGDLEESPQGEVPHDSLQDKLPVADIKAVVTGKDCPHMKEKGALKQNKEVLELAFSILYDSNCQLNFIAPDKHEYCIWTDQALLGKDMMSDLTRNDLDTLLSMEIKLRLLDLENIQIPDAPPPIPKEPSNYDFVYDCN

SEQ ID NO: 1596 - DNA, 165298 bp, Mus musculus
  misc_feature (1)...(165298): n = A,T,C or G
ctttgtttatgttcaaaacagttgactgtgtgtcatttgtcaagttcagttgcacagtgacgtttccccctattccagaacataagaatcactctgggtactgcctgagatgcagcccaacagtgtgtcatagcccatcagccctaacaccaaacagtgggaagagtaagctgggcttactgggatactgggaaggcctgtcatcacttgcagaatgttgccttggtgataactggtgtagaaaaagatcattggaaagagaggcccatcggtcttgcaaactttatatggctcagtacaggggaatgccagggccaagaagtgggagtgggtgggtaggggagtgagggggagggtatgggagacttttggaatagcattggaaatgtaaatgaagaaaatacctaataaaaaaaatcctgaaaaaaaaaaaaaagaaagaaaggatgcttttgcagcaggaagtaccctgtcttcattagggtttctattgctgtaaacagacaccatgaccacggatactcttataaaggaaaacatttaattgaggctggcttacagcttcagaggtttaatatgttattgccatgctgagaaacatagcagcatgcaggcagacattgtgctggagaaggagctgagagttctgtgtcttgattggcaggcagaagtaaaagcccaactaggcctagcttgagcatatgagacctcaaagcccgcctcacagtgacatactttctgcaacaaggccatacttcctaatagtgccactccctttgggccaagcattcaaacatatgagtttatgggaggcactccaatttaaaccaccacataccttatgctggctgatacacggtagaattgcttaagcaaaggaaacttcacctgaggaactacatccaccagattagccagtaagcaaggcggtgggaaatttcttattatgattgatgcggacaggcccagctcactgtgggtggtaccacccttgggcaggtagtcctgggttgactgacaaatactgtataacaaatcaccaacactgggcatgaaaagccctcttttgagttgtgtgctaatcaaggttgtgcaaaagaatcccaaaacatacagccaattgctatggcctttgattgctccgtggccaggcatggtcttgcaggtctgtgaccacaccattcaggagggagaggtagaaagattgcctttggttgctctaggaggtggaaggaaagtccctattgataaagtccctgttgcttcagaaattgggcccagtggctcctgaactggaactacttaaatgcctcctccctaaggccatgtaagcttccaaaggagggaagcaaccgcagtcctaaccacctacgtatgacgtctatcaactacaagatctgactttcctggctgctcattttcctacgttacagctcaggactgacacccagtggcttgtgagaataaagctctccaaatgcatttcaagtctgcaggaatggaagttccttccttgttagtgaaagttgtaaaacttcctattcagaaatgaaaagaagaattccccttctgggaaatcaagaagccttctaccactgacccatatcctcagcctagccttctcagagagctgggtttagccactattttctgctaaccaggacagccctgaaaacatacatacaggcaacattatatatatgaatacatatgactatatgaacagatataatatattatattcctaaatataacctgcttgtttttttatatatatacatgtatgtgtgtaacagcaattaatggaaaagaggctaagaatgtgcaggaaagcaaggaggggtatatgggaggatttgaagggaggaaagagaaggtagaaatgtgtgattataccatatcaaaagtattctgattattacagaattgagaactatgaaccagtgggaaattttcagttgcactgttgtaactgattttttaaatttagttagattttttttcattatctagtccttggtccatggacatttaggttgtttccattttctagctattgtgaatagagaggcagtgaacataatggagcagctatctgtggagtaggatgtctgtcctttgggcatatgctaaggctggcatagctgggtcatatggtagatttatttttagctttttgagaattcttctcagtgattttcaaagtggctgtaccagtttgcaattctacccatagtgaatgagggttcctgagggatatatatatatatatatatatatatacacacacacatatatacatacacacatacatatatatatatacacacacatgtatatatatatatatatatatacatacacacatacatacacacacacacacacacacacacacacacacacacacacacacatatatatatatatattagttttctgtttatatatttatttgtatgtgtggcctgcaaggtagtccagcaagtacaggcacttgccaaccaagcctaacgtttttagttcgaatcccaggactcacacgtagaaagaaagaaatgattctcacaagttgtcttttgaccaccacacttatgccatgtcacaagcatccatccatacaaataagtaaatgtaatgcaattgttttaaaaataaagctaaaggccagattctgtctacaaagtgtaaatacactttttttaaacaaatgaaggcttggaaaatcatgtgtgttcagaaaacgcttcctctagcaccatgatgtgcagtctactgcccatcattggtggcaatgccaggtttgcttcagtgtcaggtgcctgcacttgcaaacttcatttcattaagaattatatgtggccctctctcctttctgccaccgccatgccatttagactgaggaaggcctcaaaactccagggccatgtgagccacggccacggccacatcggtaagcaccgcaagcatccaggaggccgaggaatgctggaggcaggcatcaccacaggatcaactttgacaaatatcattcaggctactttgggaacattggcatggggcattactgcttgaagaggaaccagaatttctgaccaactgtcaacttggatgaattttagacactggtcagcgagcacacacgggtcaatgctgcaataaacaagactggagctgctctcgtcactgatgttgttccaatcatgctactacaaagttctggggaaggaaaagctccctgagcaacctgtcatcacgaagaccaaattcttcagcagaagagctgaagagaagatgaagggtgttggaggtgcctgtgttctgatggcttaaagtgaccaaggggtgggggttaattaaatgctaacgttaaaaaaattatatgtgtatggctcttttgtctgcatgtaatgtttgtgtcccacatgtatgcctggtacttaaaaaggatggaagatggcgccatatcccctagaaattgggtgaggggaatagaacctgggtcttttaggagagcagccagtgttcttaactgttgagcaatcctttcactatccctggtcaatgaaaaatgtttgaactgggtctaactgttactcaagctagtctcaaactgctcaaatgatcctcctgcctccgtctcctcagaggctggaaagacaggctccttcctacaaacctggttttgcaaacgttattatctcttcatctgaaatacgaaacaaaacaaacaaaacaaaacaaaaaacagtgtttgttttggaacaacagtctaaacacagacatcagagcctccttgtagacttaaaaaaccttacatttatttactttgtgtgcatgtgtgtggatgcacacatgacatggtccacatatgaaggtcagaggacaacttgtaggagttcttttgcatgtttttcattcatcatgtcctactctagtctttgggcttggcagcaagtcccttaatctactgaatagtttccttggtaccttgtgagctcaatgtagtgttttcattgttttccatttggtaaccttagcaaccacaagcaaggttaagcatcagacgtggaagcagaagctccactgtgcacgctgggagggtctggtacttcccagagatgaggctgaatatcattaaaatgtcacttaagcgacttagttcagaggtttcatttaaaaatcatttaaccgggcctggtagctctggcgtgtagtcccagttactcaggagacggagacaggaggatcatgatgtgttcatgcctgggcaaggtggaagagagcaggttcaaagctagtgtcttagtgagggttcccattgctgtgaccaagagttccaagacaactcatataaaggacaacatttaattggggatggcttacaggttcagaggttcagtccattatcatcaaggcaggagcctggcagcatccaggtaggcatgacttgggaggagctgagggttctacatctcaatctgaaaggtgctaggagaagactgtcttccagacagctaggagaagggtctcaaagcccaccccaaaagtgacacacttcctcccacaaggccacagcccctaatagtgccattccttgggatgagcatattcaaaccatcacattctattccctggcccccataggcttgttcaaacacatgagtctataggggccatacctagccataggataatgtaaaatacatttagtcctacttcaaaattccccacagtctatcacagcttcatcaatgtttaaaagtccaaagttcaaaatctcttctgagattcatataatcacttcactgcaatcccctataaaattaaaattaaaaagcagatcacatgcctccaacctcacaggatatatattactactccaaattgtcatagtgaggaaatactggaccaaagcaagaccaaaactctgaactctgtatctccatgcctgatgtcaaagcactcttcagatctccaactcttttcatctttgttgactgctgtcagcagatctgacattcagcagcaacaaacgtcatgctcttgggctggttccactccctgttagctgcattcctcaacaggtatctcatggctctgacatctcaaatatcttggggtatccaaggcaacttcaactttacagcttcttgttccaaagtctgggatccactcataatgttctggtctcctctaaagggctggcgtcacttctgtcttccttagcactctaggctctggttgactcccctcctttgttgctcctgttctttctgatcatctccaatttgctggagtcttccactgcaaccaaccttcaccaacagcctcaatagcttcatggtgccgagcctcaacttctttccaagacccctttggtcctgggccatcaactgcaactaaggctgcacttcaccaatggccttccctggcctcttacagcaccagctgccctctatcacttctttatgacttcaaagccagtaccagctgaatgattcttaggcattcccaagtccagctgcagcacaaggtacaatcttggctattcctggaacacagcttcattttgtgctctcagaaaacactagaagactcgtcttccaggcagctaggagaagagtctaaaagcccacctccaaaatgacacacttcttcccacaaggtcatacctcctaatagtgtcacttcctgggccaaacattcaaatcaccacagctagcctggacagtttagggaaaccctgttcaaagaaagaagaaaagaaaggaagaaaggaaggaagggaagggaaggaaagggaggggaagggaagggaaggaagagaggaagagaggaagagaggaagagagaaagagaggaagagagaaagagagaaagagagaaagagagggagaaagagagagagaaagagagagagaaagagaaagaaagaaagaaagaaagaaagaaagaaagaaagaaagaaagaaagaaagaaagaaagaaaggaaggaaggaagaaagaaagacagaaagaaagaaagaaagaaaggaaaagagctggggtagagcatttgacgagtatgtaccctaggttggatccccagtactgaatcaatcaaacaacagcaaaacaagcaaaacaaaacaagaaggaacaagatcccgactgaatgttcttctcttacctcataatcgcattactaaaggggcaaagaaggaacttgctgccagttctaggtcagctggaatatgaagtgaaacactgtctcataacaaaagtaagcaaacataacagccatctttctttctttttttaaaattttttaattagatattttcttcatttacatttcaaatgctatcccaaaatttccctattaccacccccaccccctgccctgctcccctacctactcactcccacttcttggccctgacgttcccctgtactggggcatataaagtttgctagatcaaggggcctctcttcccaatgatggccgactaggccatcttctgctatatatgcagctagagacacgagctctcggggtactgattagttcatattgttgttccacctatagggttgcagaccccttcagctcttgggtactttctctagctcctacattgggggccctgtgttccatcctataggtgactgtgagcatccacttctgtatttgccaggcactggcaaagcctcacaggagatagctatatcagggtcctttcagcaaaatcttgaacagccatctttcattcaggaactagttagaagacatctgtgaaccttatgcatgctgagacagggtctcatgttagcccatactataaaaaagaaaacatgatggtccattttcaaggcagaagtaccctgagtcagctctagtctatctacagatgaacaggaagcactgggcacctactggtgccttagtagtctagctgctcctctcaaactagaaatttagaacagaagttgactaacagtcaagcttgtttgacaatctttagacaccacacattccatgcactcaaataactttaaaatggaatttaacatgcagagataacatattctctcagtccttgttatgaaataggcaacgtaagtgcataagtggaagatccaaccaagaacaggtagaaggcttttgacacactaagaatctatagataagacgcaaacatcagaaaattctgatgcaccttgaggatcctggtggttaaaggtccgactggagacaatgaaagggcaggctctgttggagctgcagagagtgggttgtgtttactgtctctgctatttcttggctctgtgctctgagctttggttgccattgttcctgttgttgtggttctaaggatgcccagcttatgtggaggggctgagattgctgctgctggaaacctggacacacaagcaaaggaaggtaacaagacaagaggactgggctcagtgtgaatttcacccattatgctaatagataaaatatgttctggaaaggacttcccattgctgcatgtatttcctatcttccaaaccagagctttgccagagctttgcctccactccagtctcattactatcatttctatgactactctttagagacagggtctccctgtgtagccaggctggcctagatcacagccatcttcttgtgggaacctcccaagtgttaggattagaggcctgggttgtgcctaacaaagttgtgactgttacatggaaagaacttcaccctgcagaaaatatcaggctaatttcttgagtcagatgggggacccatgcatcagaaaacggtcactgcccatctggcaagatggtcttgcttcttactgccttcttgagtctcaatgtcatgcttcttttagtgagtgcagtatctgcaacagggtagaagtagctagattcatggctgcatcacagaacctagaagggaaccttacttagcatgagtttggtagtagatgtccccagtagagcttctgtttgttctcagtaaggatactattgttgggagaagaagcagctatcttgtgttcatgttatcagtaatttgggggttacaactattcccccctttttttggtgactccagaggccaatcttggactctttataggcttaaatcatctgtgctagctggttggtactgggatctcatcaccatcaattgaatactccctaatctctgctttatatacagcaaaagcttattgattatgcatggcccgaatgtgagcagtaacagaagacttatcaggggccctgtaattgtagaaatgagggtagttaaccatggggaagtattaaatagtgaatgataccagcttttggagttttctcgttcttttttggcgcctctctatgctttctctaaccttagctagtaattctctgattattccagagtgatttacctaaaagcaacattcttctcatagagccgcacacaagcctccctgctgcaggagcaaagtctaaccctcgtctgttctgaagaactgcctcagccagagaatctacatttcgctctaggtatgcgatggatttttctaagtattggatgtcttgatctatatctaatttaaggctgttgtagttcttctcttgcaacgttagggctgctatcccggagctagccctgctcccagaattacagccaaagttagggaaataggttctctcttctgtctcatgaggtctcccccaacatgccctattaggttctttggcactattttttctgaataataggttatgcgtggcaccaactgaactacaatacagaactcttttgcagtaggggaattaaggacctctccgtgcacacatggagtcaaccctgttgaacagtcccaccaagcctgttcaggggtgggtgggtgggtaggaataacccagtttgaatgaaccatgggggttttttggttacaaaggtgctgatgtgacaagggaatgttccccaggcaggtcccctgtcttgatatggtggtctgcaggattaaggctggacctcttgggaccatctgcatgcagtgtctctctcagacttattatatctagatataaatccaacaccttcataaaaagggggtctggcattagagcacagccagcaggaggtggttagctctggccgggagccgttcaaaatctgaaaggtttttagcatcattgaccagagcagatctaccagctctgtgcgattcaaaaaagatcctggggctggggacccctgctgggggaggacttggggagggggcagcagtccaaggacgggctttggcgcaggttttttcggggcaagacctcttggtttagggtttgccaaaatccgatttggtcctacagccacccgcagggggttcacaattggttttaccacaagtttgatggtgaagaggaggcctggactaatccctccaatgacatggagtcattgacatggagtcagaggccccaggacctctcagcttcccaacccttccctgtttccctttgtctgtaaacctcagtaaaacttcagacctgctccccttcctgccaactgtgataaggtcttccttcgacactccccaggttttttagccctctaactgatgtctcacaccccccaggaagtacagtaaaattgttctggacccccacatgtaatagtccttttctgtcctggacatatataaagttcttcaccgacatggtggatatgaatgccataaagtctgttaggtgtcaggccatgagttatcagccagctggcacagatcaaaggttaaatctggaaaccaccgggtcccaagtgacttttttgtattaggaggttgggcccggtaacccgtttcaggattctcaactgtccaagtcaagtcataaggctggtgtgagtttttgatctctgaatggagacatgggctaggaacagcagtgcatgaagccagtaaaaacagcaagcttaggacagagttaattttaacttgaagggatgagtgcccttttggaccctccattctggcagtggcagctgtgaagtctagcgatcttcttctggagagaacagatcagcaggtgagtgcagtgtatccaagtagtgatacagtccacctttacagctgttaaaattgttagcaggataatgtagggtctcttctaacaaggctccagcgctttctggcaaaactgcctcacgtagacctagtctccaggttgaaacttatggggctctggaactggggcctgcttcatagagggcacacagtttagaccaaccctgctcgtgaacccattgagttgctctgaccttcgttatgaatttcataaccttctaattctgcaatggctactgactgaaggttagggacaataggggcagggacaccatacatgatttcaaaaggagttagtcctaactggtaagcacaaagggaaggagtgtcacctagtctatggcagactctagggctaatttagtcaaggtctcctgaagtgtctgattcattctttctacgtgtcctgaactttggggcctgtgcacaatgtaacttcctatctgtcccaatatatctcgctacatcctggcttactttggacacaaatgctgtcccattgtctgaccctgtcatatgagggaatccatacctcggtaggatatcttccagcaacttcttagccactgcctttgcagtctcagtctttgttggaaaggcttctgtccacccagagaagctatccacgaacactagtaagtccctgtagctgtactttcctggtttgatttctgtaaaatcaacttcccagtaggtcccctggtctctatcctcacagacataagccagaatgtttggcagtgctgtgggtgttggtcaattggcaagctctgcagcttgatattacatcttcgacagtacgctgcatttttctgaaaatcactttagattgtctcactgtatctgccatccgtttcactcccatgtgagtgattctgtggatttttttgaggatagaccttgctaggggggcaggtaatattagcttaccttcagccatctgccaccagccctctgaacactggttcatgggctgactcttggctcatttgacctcctcctccgtgtaggctgggcattcctgtaggttggggtcgggtggttctggtaaagttgcagctaacacggaggcagctgtttcctctaaggctgcctctttggcagctctgtgagccaagttcttacctctggtgactgccgtggttcctttttgatggcctggacaatgtatgattgccattctcattggcagccagagggcttcaaggaactgtaggatcccatctttgtttttgatagtttttccttctgcagttaggatccctctctcctggtatatggcttcatgtatatgggccaacgcataccggctatcggtgtagatgttgatggctagcctttttcccatgatgagggcctgggatagcatcagttcagccctaggagctaaggcatctgcggggagagactgggcccaaattacctctgtttctgtggtcactgcagctcctgccttcctctgtccctctcgaatgaaactgcttctgttcatgaatcaagtctgctctgcccctgtcaaatgcgagccttttaggtccggtcgagtactgtatgcttgtgccaaggtttcactgtattggtggagcagctgatccaagtccgggtaaggaaggagagctgtgggatttaaggaagcaggcgagtggaaagtaacttggccaggattgattagtagggtctgatagtgagtcatgcaggcattactgagccacctgtctggtggctgtttgagcaccccttcgattgcatgggggggggtagccacagttatattctttcctatatctgcatctttaaccagtaatgccgcagccacaacgttgcacagtcagggtggccatcctgctgccactgggtctaatttctttgatagataggccatagactgtttccatggtcccagagtttgagtcgggacccctttggctatttacttctgctcgttgatgtacagatgaaatggttttgttatgtctggaaccatctggaagccccaaagcaggagctaacagtaggttctgctttattttatcaaaggtcttttgatgatcttgagtccaaacaaagtctttggtctctctggtggcctcatataaaggtttggctatttcagtgaaacctggaatccatagtctgaaaaagcctgcggaacccaagaactctctgacctgtcttggactctggagggtgggtatgctgagaacagtcgcttttcttgttgaagaaagccactgttggctctccttcagaatgtagccgagctaagtaacctcgattttacagagctgtgccttttggccaacaccagatatcccacgtcccccagagcctgtatgtacgtgatttggggtccctttcttgcatctttctccagtttctgctgcaacaaggtcatctgcatactgaacaagagttatatctgggctattaactctgtgctcactcaggtcctcatgcagagcttcatcaaacatagtgggggagttctcataaccttgaggcaggcgagtccaggtaagttgtccattaatgctcttctcaggatcatgccactcaaaggcaaaatactcctggctcttgggggccaagggtatgctgaagaaaacgtcctttaagttcaggacagaatgccatttctgatctggaggtagagagctcaacagggtataaggggtaaggcactgtgggatgtatgtccattactctgcagttaacttttcacagatcttggacagggcagtagtcattggactttgcctttttcacaggcaataatggagtgttcccggtcaactctcatggcctcaggactctcacagccagcagtttccagatatggggattgatccccttcagtgcctcttgggacatggaatattggcagactctctctggatctgctcctggattgagctctacaaatacaggaggtcgatgttttgcaagtcccattcctctggtctctgcccatgcccggggaaatgtttccagccagacatctaggtcttgtttggggctggctggtgattcatacagtctatattcagcctcagagaccaggttaagtgtcagcacctgtattggatttcctttccagtctgttagccagactttcccagggtcaaaatgaatctgagctctcatttttgttagtaaatttctcctcaacaagggttatgggcattcagggatcactaaaaggagtgggacacttgtccagttcccaagtcctttgagtagtccatgaatttgcttggcgcctgtggctccctgggcccaggattttttactagacaaaggcccttcagcctttatgagcaccgaatgttgggctccagtatccaccaggaagctcagaggctctaccccaactctgagggttaccatgggcttggggagggggtctgagcctgatccccctcaagtcttcttcagtgaccatgatcttgtttttaagctttttctttgggcactctctggcccagtgtccttcctctttacagtaagcacactgatccttacccaaggctctctctgggttctggctggcagctttcttttggctccctcccttctgcaatgttctggagctggcgcctcgtctatttctggtctgaattaccaagggctagcaggatttttgctatatctctgcttaacatcttccctgggttggccttttcctcatctttagttttcctgttatggtacacttcctctgccactcccactaaatctctcaatgacttttctcataatctctgtagtttctgtaacttccttcttatgtccggtgacgattggtttatgaatgtagcaccactgtatttgtgtttgccaaatcttcaggatctaagtgtgtgtaacagcggaaagcatccataatcctctcaggaaactctgcagggttctcattatctctctgcctgacatcataaacctcagccaaattggtgggtagcttagcagtggccctgagacccgccatcagagactgccgataaactcagagacaatccctaccttctcccgtgttgtagtcccaggctggttttctgagagggagcccttcgtccgtgtctgctgggttttgggtttcttgcaatgattccttgtagcctagactgagcttcaactgactgtgtagttgagaatgaccttgagctcctcaaaatgttttcatttatattttaaaagtttactttgtgttaagggggctgcatatgtcacagcacacgtgtggagagcacaggacaacttttggcaatcagttctcttctttcaccttacgggtcctgggaattgaattcaggtcaccaattgggcctgacagcaagttcttttagccactgagccatctctatgacctgtaacctggatcagcagattttcttcagtgacagagtcctgtgtgggaggtgccaggggatgaaagataaagaagatagaagagatggactcaggaggtcttacatatgctgtgacgtatgccaagcaagcttaagaagcacagcatcttatatgctatttacgggagagaaatgggatgaacccagcagaatctgtcatacagtggacctgacctctgtaagcagagcttctagaagctgctgatgcatgccatagtaggctgctggtttgtggaggtgtggcttcagcaagttcttgctggagacctaatgcaaatggcttgatggatttgacacacctgagttgatgccactgaggctgatgaagctctactctgttctagtagcatgccttctgatgtagaacacggcaggcagaaatcccagggaagctcactccatagaggtataaaagctgtagccaataggacgtgctggctcacatctgtaatcccagcactcaagaggctgaggtttgagagtggctgttagtttgaggctagcctgggtttcatagtgaatttcaggtgtgagaaatttgtcttaagctggtttagtaattgcccctgcttctgctcataaaccctgccccttgccatttattcctgttggttagattagcttagtttttttttttttaaacatgtaatcagctttcctgcaatggtgactcactgctgaattggagaccgtgtacactcataaattttggaatgtttcagtgtttaaacactgtcacctttatacttcccttctgttctctcccagcggctttccaagacagccccatcaggggtggactgtggggtgggacctcagacaacgaggaacagctctcaatagggataaaggatagaggccatgctgaccatgtgtgcttacccctctggggtttggaccatgcaaccttccatccagaagttaataaggcattaccaagacactgtaactgatgaggtagtcctcttttttacaatattaaacacatttctaacacaggctggcctggaatagagtgagaaccccatgtcagttccaagtctgaaatggaactttcccgtcctggtcttctgcatgttttgcttatggctgtggtgaattccatttgggctagttggagaaaattctgaggcaatattgaaaacaatatttcctctgttatctgaggcaaaggatataggctgtatatagactcagcttaattttttctgtgtgtgcacacatatctgcatatgcaagtgtgcttgagtgtgtgtgtggggggggtgcagaggacaatttctccaggtgcctttcatcttcttgtccgagacagcctggggctttgcagagaaggataaactagctggtcagtgtgcttctaggggtcttcctgtctcagctcccattcccccatcacggggattacaagcatgggccactgctcaggcttcttacctggattctggtgaagcaatctcagatttctatgtgcgtgacttgggggttttaccagttgagactgctccccagcccatgtccagtttttccttttacctttccttgaaaatagattttttttttccctcacgcaatatatcctttttacggttctccctcctatactcctcccagctcctcaccatctgtctgcctctctttagaaaacaaataaacttctatgggcaataataaaatatagtaagataaaaccaaaactaacacattggaattggatagcacaaacagaatgaaaagagaccaagaaaaggcacaagaatcagagagcttcttatttacacactcaggaatcccagaaaaacactaacctggaagcaattgtatgtacacaaaggacctgtagagtaaaaagggagaaaagaataaaataagacaaaactttaaaaaaataagataaaattaaagtgggtgaggagccctgatgtgatattatgagacaaggaacctccaaagatgctgttgatttcattttctgttggccattcactgctggatatgcagcctacccttaagagaaattttgttcccccagtgagactcccttggaggaaactaagttttcatgtgcaagtggttatcagttggacatagctcctgggttatggacaggggcttctgtccacttctcccttcaagctctaggatgccttgttagggcagacctgcagacccatgctgcctccgactgtgagttcatatatgctttcatcatgttgacttagagggtcttccttccttgctatcttttatcactgtagttcttatactctttctgctgtctcctcagcaggattccatgagccccatgggaagagattggatggagacatcgcatgaaaggcttagtgttccaaggtctctaactctctgcgtagtatttgtctgtgggcctctgtatttgtttccctctgctgcaggaggaagcttctctgataatggctgaacaaggcactgatctctgagtttagcataatgtcattaggagtcatttcactgctacattttttttaaattttttttatttttttttatttttttgtaagaacagtagtatttgatcttacccaaatactctgactctctgggctatttggtttcaagttcttggtcactcaagttgtggattccaccttttgcagtgggctttcagtctaatcagatactggttgttcattcccatatactctgtgcttctaacacactagcatatcttgtcggcgacaccattgttgataaaagagtttgtgactgggttgatgtttatgtttcttttttgacaatatgcagggtacttctctgtatcaaagacactaacacatcaaggtgaagactctacataggcaccagttcaacgtctctgtgttcaatgagttgtgtagatgttttcagcaatgggaccttgtcatcagattgtggagagccacctatagtcttggcaacagattgaattgtttagggatgcccatggaaccccattgccaacaaatcaattcgatgtaacccaatcctagtaccagaaggttcatttggagacaatagctgtccaattggggctaccttacctcataatttggtaatatcttttagattatcttcatacatgtgtatgttttaggaaacttctactgtattaggttcccatattacccctaaaatgtccttaattttagctgtctctttctatattccctctttgtccccctgttccttcctcctctccatttgaccctcctatttcagcccccccatctatccataactaaatattctaattcacttttttagggggatctactctctcccctcagtcccttatctcatacttaacctctgtggttctacagattgtagcttggttactattgacttagcaactaatatccacatacataccatatttgttgttctggatatgggatacctcacttaaaattattttttctaattctatccatttatctgcaatttcatgattttattttatttaatggttgattaatattcaattatataaatgtataacttttttttatccactactgtcaagggaggatatttaggttgttttcaatttttggctattatgaataaataaagcagacacgaatatagttgagcaagtgcctttgtgaatggatgaagcatcctttgggtatatgtcaaagaatggtatagctgtatcttgaggtagatcaatcccaccttcccgaggaactgccacactgattttcatggtggctatacatgtctgcactctcatcagcaatagaagagagttacccttgttctacatccttgccagcatgagctatcacttgtcttagccagtcagacagaggtaaaatgaaagcttaaaggacttttggtttacatttccctgatggtgaaggatgttaaacatttaaatgtttctcaatcatttgagtttcctctttcgagatttttttgttgttgttattgtttagatctgtataccacttttttctttctttttctttattaatcaatattgcatttctcacattttacttgtcttttagtgtctacaattgaacattatgctggttacattttcagagattctaatcaattagaagtgagaagacatattctcagggttttctcgtctgtatcataaacatacataaactttttaaatttaaacaaaatgtaatgtaatgctgcattgataggcaaggttgtttgactgtctcttttttgttttgtggaaaacttcacatataaggaattcattatatgatctatgctgtcctctctcccacttctgtgtaccactttttaactgaggtatttgtttccttgatacctaggatttttttttttagatttttttccctatattttgaatagtagccctctattaaatgtgtagttggtaaaacattttccattttgtaggctgccactttgtctgaataatgctgtcctttgacatgcagaatcttttcagtttcacaaggtccaattaattaattgtggatcttagtgaccatgttaatagtgttctgttcagaaagtctttttctgtgccaaagagttcagggctatttcccactttctcttctatcaggttcagtgtatttgattttatgttgaagcctttgatccatttggagttgagttttgtgtgaggtgacaggtatggatctatttggatcttctagatgcggctgcccaggttaactagcaccatttgttgaagatgctgtttattttgtctccattgtgtatttctggacttctttataggtgaacacatgaattctttaatagcacaagttgtctttgagtttcagcatagactttctaagcactactatgtactagcaacctgatttccctttagtaatctgaatctgtcatcccggcgacttgtcattgtctttctgtgcccttcacttcagtagtaggaggaaacccaatagttgttgttggcactcctggcctccaaccagcagaactcagcatcatggaaggagatgaagaatcctgcaactgttagataagagaatgagcagaattatcctcctctagaaagccagactggcaggaggaatgacatcatacattgcctgtcatatacgtttactagtggctgtctgtgagagcatattcttctagactattataccctaactggtacatttaaaacttgagttttggttagcccattcctagcctgttacctgggatccccttgttttctaggacatgggtcaatccagtgagattgagcaggtgtcgtggcacacacctgtggtcctagcagttgggagaagctgtcttggcacacacctgtagtcctagtagttgggagaagctgtcgtggcacacacctgtggtcctagcagttgggagaagctgtcgtggcacacacctgcagtcctagcagttgggagaagctgtcgtggcacacacctgtggtcctagcagttgggagaagaaggagaattgagagttcaaagtgattcttggctacatagcaagttggaggccaacctaaactatgtgagccctgcatcaaagtgaaccctgcctcaaaacagtgctgataaaaaccagtgcactccacaaggatgtgctgtgaagcaaaaatccatggactaccacgaagattgtattaccatggtgtcaccgtgacaaaatatctgacagaggaaacttaaggaagggcttattggggttcgttcatcctttgagggtatagtccatcatgatggtgaaggcatggtagcaagagagaaaaagagtggggggagggggatggtggtactcaaatcacttttactctctccagaatctcagcccatgagagtacaacccaagttcaacgtaaatctttccttgcagttaaacctctctgagaatgcttacacacacacacacacacacacacacacacacctcagtttgtttcctagatgactgtagatccattgagttgacaatggtgaggaagcaacacaggatagtggtgttgtgtgatacgtcccaactctgagagcagatccaaatttggactagaattaattttgatgaggaagaaacactcccctttctgtggtacaagagtcccattataatctgggctgccactaggtggcaatggttctgtactaaggactcagctgacctctgttcttgacatatgggtcatctgatcattctttaaagaggggagtcacgctagccacctcagccactagtacccctttgtatttaagggggaaaggctgatgtagagaatggccccttgttcatcagcagtggctgtcttttgggaagtgtattagttattttttcgcctctgtgattaacaactcaacagcacaagggtttattttggttccaggtttgaggtttatagtagcaggaaaggcaaaatggcagaattgtctttggtgagggtgccatgtagagcttgatacaactgtgtgcccacatctgggcagatcaggaagcagagagttgggtggacttctgcttagtttccttcctcctcttcaattttagctcatggggtggagtcattcacatgcagggcgggtcttcttgtctctgtaatctttggacaagctctcacaaatgttcccagaagtaagtctcccagggtattctaaggtcagtcaagctgacaacaaagatgaattacttagaatccagatacacactggctgtgagtttcctaatactgttctccatccaagagtagacgtgttcctactgaaacacgtcagaaacaaggcaagcatgccagcaatcaacagtggggccccaaagggggagagaaaatgtcttctctcagaagccttgaacctgcctgccagaaccatttgcgagaaaaggaagggtgaagcctttttccacttcctgagttcccatctgtcaatgttcatggagtgttaacctctcctccttttgtgttgtttgtgtgatgttgctgagccaatcctcagggcacagatgcaccatcagatggcacctgaatgagattgggtaaagaagtcagaagtgctgaagagctcccagcatagagtgtacaccaggacaggggttgcaccttagtggcagagaacttgtttatcaagagcaaggtcatagtctcaattcctaaaactgcaaataagcattattgtcagacagctgtaagagagaaaatactgtctgatttgcataaatatgattatttatatagaaaatcaaagggatatcacaatgtaaagtaattgataagattgcaacaacctttccagactgaaaaatatatgaagtccacactgtatctgcaaactctttagaaaaagcattagagctgggccatggtggtgcatgcctttaatcccagcactcaggaggcagaggcagatctctgtgagttcaagtccagcctggtctgcagagtgagtcctaggaaagccaaggctacactgagaaaccaaaggaaagagaaaggggtcagggagggagataaaaggcaatagaaaaaaattcctgtgtctgaaacaaagatgttaaaatatgataaaattcaatggagacttagagctgtttgcgatggtggtttctccgttctctgtgtgtagtacattattttgttgttgttgttatttacgtatatgggggagtatatgtatacttgtatgttcagatacctttggagcatcaaatcccttggagctagaggtataggcatttgtgagctgccagatgtgggtgctggaatctaaattctggtcctcatgacataatagcatcttaaccactgggccatctctcattagtatccataaaaagtgcttttgtaaagggtatttttaaaggcttattttatttttacttatgcatatacgtatatctgtgtggggtatacgcatatgcccaaggaggctcattattgggctcccctggatccagaatgacaggtgacagtaagctcccaacctgaatgctgggaactgaactccacccagtcttctgcaagagcagaatacacagttaactactaagtgctctctccagccatataaaaccatttttaagcaattaagctagaatttaatatgaatcaatcagcatcctgactttattttctgtgggaactttagctttgctctcccttggattgttgcccttgttatctggtcagtgtttatggttctaacaggactgccaatagcactgggaactctcctggaaacaaaccaaatactcaatgaaagggagtcacaaatggaagactagatacctatttcagtgttgtgcctgacttgtgaatcctaaaaggccaccaaggagtcaattctgatgcaatcccagtagggtctcaagcttgagccacacagctgtctctgacacagcagaaatggagggtgaagcctcaagctctcaccaggacaaggttttataggaaatggcaagcaattgagggggtttctagcctggcacacatgtaactttaagtttttcaaaccttatttttaataatggttcttaaacactttaacatcccctttagcccaccacccaccagaggtagtgggaaagaaaggatgggggttgggagtatggacctgtttagaaaggttccttagggcaactcctatcagcagcttccaggttagcaacggcagctcgatccactcgaaaacatttcacagatatgccagcagcacagtttcatttgagtcgtgatagcaaacatgaatcagcaacagtggtactacttagcagagacagccaggcctcagcctcagctcaagtcagcaggagggaccatgagggacaccagaagttctctgctgtgcctttcttggggaagttaagatcagcaaagatacaagacccacaagcattgaacagcgagctctataagcaaaccaagctctgtcttcttcactgtccatcgagtcctatttataccctccaggcatcatgtgccctctgcaggtcttacctcagcacgtgtatctaatcagcatgagtttgtggagtcttgacaaatgcagctcaactatgcaatgtaaggcaaactaatacatatgtgttgttagcaaagaatcttttatcatgtgctctttcatgttcttgctttagcagaataccctttctcctgggtcagcttcagtgaaatgttccgtcgtgagtgtgcctcagtctttcacctgtgttcacttcaggaaaacactccatcacttgtttgccccagcaaaacaccatccaacacaactgacttgccaaagaacccttaaagtttctactactcacacagctgactgggggctattatggaattttgttgccctttaaaataattggctggtgctgggagtcaaactataaacttaatttctgctttcctcctgattgggggttcttaggaagtgaagtgacaggggcagcttgtaacctggaggtccaggcttgttggggagtgacctggaaactggtgctagagagttcaactttaagtcagattgtctaagatggagtctgaacacaagatctggttgctgtccagacaagtgcattctcacatacaccagcctttgttgtggatgtgagacaaacctttctccccaatttaaagctgataaaaagctagagcctgtgattgggcagtagagagagaaaaatgcaggacttgaggattgagtgagaggtctcaggagagaccgggggaagaacaaggagaataggacagagggagaaggaggcctccatgagtccagatggagcatgagcatgtgccaggagaagtgcaccttgaagacaggctgagagaagcagccggggagagactcaagtgataaggggcatatgggcttggatataggtgagaatagcatagattttacccagtccaggcttacagcttgtaaataaaataccaggtttctgtttcttttatatgggctagctagaataaataattcattcatatatggtgccatgcaacccaacccttttaatttcatattcagttcttagacagagtcctgggtgaaagatggttttctagccaagagtggagaaccaaagcatttcagaggcatggctccattaagagaagctgctgccttgcagcatagctggtaggttgtatcgagcagaggctgcactcagattggagtctgagtgcacttcctagtacgtggagggactgaatattacctgctaggtcctgcagtcttcattgatgcagccagtgggaaaacaaaatatgccttcatgaaaagcctgcagctgtgcaggggcctcgtgagaggaaagttttggcataggttggcaaacagcagcccaacccagttggcacatggaccccagatgaccgcagaaacacatgccggttctaaggccacaaaccacagtcaggctgagggctgggctgagccaaaggtgtggagttaactgccatagatatttgttgatctgaggagcctacagctgcactgaagggtaaaaggaaccttcccccaaagctacaaagggactgaaaaccccaaacttctaaactgtgtataaaatttaataggaagaaatatttacttttaaaaaaatgaaaaggtaaagtttccaaaggaaggagagagttatttgttaaggtttggttgatcactatgtattgtaacactaaatactagctctccaaggtctggttgcccctagggacaaggatatcctcacatacaccaagtgatgtttaaaactattggttgaataaagatgcctatggcctatagctgggtacaagagaggtaggtagagtttcagttcacaggcttggagtctgaggcagagaccatgagaggagagaggaagtggtgagagaagacaccatggagaaagggatcttgaggaatggctataagagctggccagtcagatttagggcagccctggcagaacagggcaagtcatatctcagggctattgacagggaagtagacataatagcatgaggggagatatctgtccagctctagagctttaaaactttttatcttttacttggaaactcaatgatcaaaaaatcaggtagaaatctccaattgagattaactatttaccacgccagttgtaagttaaaacggattttttccacattaaaaatggaaaagatgggggttcccggattccacatagtctggtctacgcaggtgagagtgtggactgcagaggctaacagcttctgggacaggtggaagccacagagcttctggggcagaccgtgttttgggctccagacaccagggtaccttccctgccagaggagaggtgtccgccccactcaggagggatttgccacagcatctcggggagccatcttggttctgggattctgcctagactactctgcgcaggggagagtgtggactgcagaggctaacagcttctgggacaggtggaagccacagagcttctggggcagaccgtgttttgggctccagacaccagggtaccttccctgccagaggagaggtgtccgccccactcaggagggatttgccacagcatctcggggagccatcttggttctgggattctgcctagactactctgcacaggggagagtgtggactgcagaagctacacagattctgggacaaaccctgtttcgggccttcatcctctgccaagaggcaggtccgaacaccagatatctgtccaccttccctgcaagaggagagcttgtctaaagagtgctctaaccactgaaactcaggagagagctagtcttccaggtctgctgatagaggctaaaagaatctcgagaggaacaagtgctaaccagagacaactataacaactaaatccagagattaccagatggcgaaaggcaaacgtaagagtcttactaacagaaaccaagaccactcaccatcatcagaacccagcactcccacctcagccagacctggataccccaacacacccgaaaagctagacctggatttaaaagcatatctcatgatggtagaagacatcaagaaggactttaataactcacttaaagaaatataggagaacactgctaaagagttacaagtccttaaagaaaaacaggaaaacacatccaaacaggtgatggaaatgaaaaaaaccatactagacctaaaaagggaagtagacacaataaagaaaacccaaagtgaggcaacactggagatagaaaccctaggaaagaaatctggaaccatagatgcgagcatcagcaacagaatacaagagatggaagaaagaatctcaggtgcagaagattccatagagaacatcggtacaacaatcaaagaaaatgcaaaatgcaaaaagatcctaactcaaaacatccaggaaatccaggacacaatgagaagatcaaacctacagataataggagtagatgagaatgaagattttcaacttaaagggccagcaaatatcttcaacaaaattatagaagaaaacttcccaaacctaaagaaagagatgaccatgaacgtacaaaaagccttcagaactccaaatacacctgaccagaaaataaattcctcctgacacataataatcagaacaacaaatgcaccaaataaagatagaatattaaaagcagtaagggaaaaaggtcaagtaacatataaaggcaggcctatcagaattacaccagacttttcaccagagactatgaaagccagaagatcctggacagattaacagatactaagagaacacaaatgtcagcccaggctactatacccagccaaactttcaattaccattgatggagaaaccaaagtattccacgacaaaaccaaattaccacattaactttccacaaatccagcccttcaaaggataataacaggaaaaaaaaaccaatacaaggatgaaaaccacatcctagaaaaagcaagaaagtaatccttcaacaaacctaaaagaagacagccacaagaacagaatgccaactctaacaacaaaaataataggaagcaacaattacttttccttagtatctcttaatatcaatagactcaatttcccaataaaaagacatagactaacagactggctacacaaacaggacccaacattttgctgcttacaggaaacccatctcagggaaaaagacagacactacctcagagtgaaaggctggaaaacaattttccaagcaaatagtctgaagaaacaagctggagtagccattctaatatcaaataaaattgacttccaacccaaagttatcacaaaagacaaggagggacacttcatactcatcaaaggtaaaatcttccaagaggaacgctcaattctgaatatctatgctccaaatgcaagggcagccacattcattaaagacactttagtaaagctcaaaccacatattgctcctcatacaataatagtgggagacttcaacataccactttcatcaatggacagatcgtggaaacagaaactaaacagggacacagtgaaactaacagaagttatgaaacaaatggatttatcagctatctacagaacattttatcctaaaacaaaaggatataccttcttctcagcacctcatggtaccttctccaaaattgaccatataattggtcacaaaacaggcctcaacagatacaaaaatattgaaattgtcccatgcatcctatcagatcaccatggactaaggctgatcttcaataacaacataaataatagaaagccaacattcacgtggaaaccgaacaacactcttctcaatgataccttggtcaagaaaggaatacagaaagaaattaaagactttttagagtttaatgaaaatgaagccacaacatacccaaacttatgggacacaatggaagcatttctaagaggaaaactcatagctctgagtgcctccaaaaagaaactagagagagcacacactagcagcttgacaacacacctaaaagctctagaacaaaaggaagcaaattcacccaagaggagcagacggcaggaaataatcaaactcagggatgaaatcaaccaagtggaaaaaagaagaactattcaaagaatcaaccaaatgagtagctggttctttgagaaaatcaataagatagataaacccttagccagactcgctagagggcacagggacagcatcctaattaacaaaatcaggaatgaaaagggagacataacaacagatcctgaagaaattcaaaacaccatcagatccttctacaaaaggctatactcaacaaaactggaaaacttggatgaagtggacaaatttctagacagataccaggtaccaaagataaatcaagatcaggttaatgatctaaacagtcctatatcccctaaagaagtagaagcagtcattaatagtctcccaaccaaaaaaagcccaggaccaaatgggtttagtgcagagttctatcaaccttcaaagaaggtctaattccagttctttacaaactattctaccaaatagaagcagaaggtaccccacccaattcactctgtgaagccacaattactctgatacctaaaccacagaaagacccaacaaagatagagaacttcagaccaatttcccttatgaatatcgatgcaaaaatactcaataaatactcaattggcgctaactgaatccaagaacacagcaaaacaatcatccatcttgatgaagtaggtttcattccagggatgcagggatggtttttttttttttattacgtattttcctcaattacatttccagtgctatcccaaaattcccccccccccaactcccctacccacccattcccattttttggccctggcgttcccctgtactggggcatataaagtttgcctgtccaatgggcctctctttacagtgatggccgactaggccatcttttgatacatatgcagctagattcaagagctatccatcaatgtaatccattatataaacaaactcaaagacaaaaaccacatgatcatcttgatagataaggagaaagcatttgacaaaatccaacacctattcatgataaaagtcttggaaagatcaggaattcaaggcccatacctaaacatgataaaagcaatctacagcaaaccagtagccaatatcaaagtaaatggtgagaagttggaagcaatcccactaaaatcagggactagacaaggctgtccactttctccctacctattcaacattgtacttgaagtcctagccagagcaattcgacaacaaaaggagatcaagggaaaacaaattggaaaggaagaagtcaaaatatcactttttgcagatgatatgatagtatatataaatgaccctaaaaattttgccagagaactcctaaacctgataaacagcttcagtaaagtagctggatataaaattaactcaaacaagtcaatgacctttctctacacaaaggataaacaggctgagagagaaattagggaaacaacacccttttcaatagtcacaaataatataaaataccttggcatgactctaattaaggaagtgaaagatctgtatgataagaacttcaagtctctgaagaaaaaaattaaagaagatctcagaagatggaaagatctcccatgctcatggattggcaggatcaatatagtaaaaatggctatcttgccaaaagcaatctacagattcaatgcaatccccatcaaaattccaactcaattctttaacaaattagaaagggcaatctgcaaattcatctggaataacaaaaaacctaggatagcaaaaactctccttaaagataaaaggacctctggtggaatcaccatccctgacctaaagctgtactacagagcaattgtggtaaaaactgtgtggtactggtatagcgacagacaagtagaccaatggaatagaattgaagacccagaaatgaacccacacacctatggtcacttgatctttgacaagggatcaaaaaccatccagtggaaaaaagacagcattttcaacaaatggtgctgacacaactggcggttatcatgtagaagattgcaaattgatccattcctatctccttgtactaaggtcaaatctaagtggatcaaggaactccacataaaaccagagacagtgaaacttacagaggagaaagtggggaaaaaacctcgaagatatgggcacaggggaaaaattcctgaatagaacagcaatggcttgtgctgtaagatcgagaattgacaaatgggacctcataaaattacaaagcttctgtaaggcaaaagacaccgtcaataagacaaaaagtccaccaacagattgggaagggatctttacctatcctaaatcagataggggactaatatccaatatatataaagaactcaagaaggtggactccagaaaatcaaataaccccattaaaaaatggggctcagagctaaacaaagaattctcacctgaggaataccgaatgactgagaggcacctgaaaaaatgttcagcatccttaattatcagggaaatgcaaatcaaaacaacctgagattctacctcacaccagccagaatggctaagatcaaaaattcagatgctgcagaggatgcagagaaagaggaacactcctccattgttggtgggattgcaagcttgtacatccactctggaaatcagtctggccattcctcagaaaattggacatagtactaccggaggatcccgcaatacctctcctgggcatatatccagaagatgttccaacaggtaagaaggacacgttctcaactatgtttatagcagccttatttataatagccagaagctggaaagaacccagatgcgcctcaacagaggaatggatacagaaaatgtggtacatttacacaatggagtactactcagctattaaaaagaatgaatttatgaaattcctaggcgaatagatggacctggagggcatcatcctgagtgaggtaacccaatcacaaaagaactcacacaatatgtactcactgataagtggatattagcccagaaacttagaatacccaagatataagatacaatttgctaaacacatgaaactcaagaagaacaaagatgaaagtgtggacactttgctccttcttagaattgggaacaaaacacccatggaaggagttacagagacacagtttggagctgagacaaaaggatggaccatctagagactgccatacccagagatccaccccataatcagcctccaaacgctgacaccattgcacacactagcaagatgttgctgaaaggaccctgatatagctgtctcttgcaaggctatgccggggcctagcaaacacagaagtggatgctcacagtcagctcttggatggatcacagggcccccagtggaggagctagagaaagtacccaaggagctaaaggagtctgcaatcctataggtggaacaacaatatgaactaaccactaccccccggagctcgtgtctctagctgcatatgtattagaagatgacctagtaggccaccagtggaaagagaggtccattggtcttgcaaactttatatgcctcagtacaggggaacgccagggccaagaagtgtgtgggggagggaagtgaggggggtttgggggacttagggggtagcattggaaatgtaaatgaagaaaatacctaaataataaaaaaacaaaaaaattatttttcaataatgattacaattttatatatccttcttaagagatggaatgctaggttagagagtatagaacagtgattagaggacacggaacctacaacaacatcaaaactggtaattccagatgaaaaggattcacagagaattatggagattatagaatgatagcccatattgacactagataaataagcttcagttataaaccaaccttatcagactggatattatatttatattgtcaaggatcaattactaaatgaaggtctatatgctgagttaaaaatacaaatcctatttaataaagtcaccttagagcaacatcatacaatagatacgtttcattttataaagtttagagaattaagatatatacaagtgttgatacaccatgttattgatacacattgagaattggacttttgccttaaattctaaaaatagtgaatctgagagtgcatttattagagacgatgcctttcttaaagatgcttttatagactgaagctaatgatgcttcaacatatgtattcattaggatacaagaatgttttagacattatggtaaaaaaacctgttacagatatgacttacagtcctccagatcagacaactgtgaaaagatctagcaggacttttgaggaagaaattgctgaactaactcagactgtttatattaaggatgttctgacctcaaaatggaggtcaggaagtatattgcattggggaagggatttttgcatttgtcccaacaggaaaagaaaagctatgttttccatctaaactgataaaagtcagatatgacagtggaagaccccctcaagatcttagctgcagacagaaggaaggaaatcaggaaaggtgaagtggaaacttctggcttccttagaaagcccattatgtcaaatgattttgggctgggacacatgaaaggatgcattatgtttagaaagaatatgactatgatcctctagacagtggaagtttaagcattggtttgctttgctccaccttgctagtcttcactgacaacatgcatgtgttgattcaccttacattgcattgctgagctctgctcacagttacttcatagagagaaacacgtgtgaggttcctgtggcttcttgctatttccgcagacttgggtgggttgatgagccttggggtttcttctggattgaactgcccttgctgatgcatgtatggtatctgccgagtagactgggctgcagctgctgattcatgtttggtgtttgctagtggactggactgagaacaacaaagattggaatcgccccaaagaactatttctaaacaagtctacttctcctgtattctaataacctttcttttccactaaagtaagttgagaaaaatatatgtctacagataggtaacataatttgctgatccttccatatgggaacccccaaaaatcttatattggtatagatcttcgtatattgatgcaaaattgaggttatattttgctgcaatgtactacataaacatgtttccaactcctacttgaggtatttttaccaagtaattcttaaaattacagaggcaagcagaactcgaagttcaaggccagcctgggacagagcaaattccaagtaaagaacagcttaggtccaggcatggtggtacacacctttaatctgggccatatcttctgctggaggcctacataaggaaaatggaagaaggaaggctcactcttatttgcctgcttgcacttacttgccagcatatctattctttaggataacctactacataacctacttctttaggattccagcttatacagaccagctaaagcaactagcctcgtgggactgagcaactattagattcttggacttcccattcacaactgtccattgttgggttagttggactgtagactgtaagtcatttcaataatttcctttaatatgtgttgaggcctgctctatataacataactgtagccacttggcatttttcctccattttgctcataaggtgaaactaagttcaggttctcagacttcacttccttgaactaattatccatagctaacactgaagaatgcaattaataagccaaaaagttatgattgaatcgcttgtcctctgttatctcaatatactggaccccccctccccagttcactacctggacaccgcccctctttcttcacctaggaccaatccactcaaaggatagctgataatactttatccagttagccaacagagcaaattccaagtaaagaacagcttaggtccaggcatggtggtacacacctttaatctgggccatatcttctgttggaggcctacataaggaaaatggaagaaggaaggctcactcttatttgcctgcttgcacttacttgccagcatatctattctttaggataacctactacataacctacttctttaggattccagcttatacagaccagctaaagcaactagcctcgtgggactgagcaactattagattcttggacttcccattcacaactgtccattgttgggttagttggactgtagactgtaagtcatttcaataatttcctttaatatgtgttgaggcttgctctatataacataactgtagccacttggcatttttcctccattttgctcataaggtgaaactaagttcaggttctcagactttacttccttgaactaattatccatagctaacactgaagaatgcaattaataagccaaaaagttatgattgaatcgcttgtcctctgttatctcaatatactggacccccctccccagttcacttcctggacaccgcccctctttcttcacctaggaccaatccactcaaaggatagctgataatactttatccagttagccaaaaatgttgtatcacttcactgtttgcttttaaacctttgaacctagtttttcctataaaacccctactaatacagaaattgttacctggagttgttctagaggagcagaggtataaggaggcatctttaaaatatcggaattggcttgataatttcacagcaccttctaactcaccagcacctttaactactgaaacctctccagacactctctctcctgggagctcagagaatattgaaggcccataatggaaactatatttcaaacttaaagaagtaaatgcctttgattatcttgatccatcaattgtgattggcaatggattaggtgaccgggtatatgtaaatttctacagtttgggggcaaataaggaaaatgattttgttggcttgttgctctcagcatctttggataaattaatgaaggaatggaataagttgcatgctttagaattgcctctgccaaagaaaatagtgaataaaaaacagtattgtattcctggaggaactgcagaaattactgctaccatcaaggacttgaaagatgcaaaggtggtggtttccaccacatctccctttagctctcctatctggccagtgcagaagacatgtggatcatggagaatgacagttgactatcaaaaattaaatcagttagtaactccgattgcagatgttgtaacagatgtatttaccttacttgagcaaattaacccatctcctgatacacagtatgcaactattgatctagcaaaagcccttttctcagtacctgtcgataagaaccatcagaagcgatttagctttcagttgccaagactagcagtacacctttacaattttgcctcatggttatattctcctgccctttgtcataacttagaagcgatcgtaattatctgtctcttccacaaaatatcacattggtgcactatattgatgacattatgctgactggaccatgtgagcaggaagtagcaaccactttggactcattggtaacacatatgtgtatcataggataggaaataaatccaaccaaaattcaaggactgtctacctccgtgaaattcttagtagtccagtggggcatgcagagatactcctaaggtgaaagataagttattgtacctggtccctcccaccaccaagaaagaagcacaacgtttagtgggtctatttggaatctagagacagctcattcctcacttgggtgtgttactcaggcccatataccaagtgagtaggaaagctgctagctttgtgtgggacctgcaacagaaggcttttcaacaggtccaggcctctgtgcacttggaccacttggaccatatgatccagcagaccagatggtacttgaggtgtcagtagcagataaagattctgtttggagcctttgacagaccttataagtgaatcacagaagaaacctttgagattttggagcaaggctctaccatcatctgtagacttttctccctttgaaaacagttcttggcctcctattgggccttaatggaaactgaatgtttaaaaataggacaccatgttaccatgtgacctgaactgcccagttcagttatcagacgtatcaagtcataaagtaggatgtgtacagcagcagtctattattgaatggaaatggtatatatgtgattggacgcaagtaggtcctgaaggcacaagcaagttacatgaagaagttgcctaaatgcttgtgttttctactgttacaatgccatctgctgccaagcatgcacctttaccttatggggtgttccctatgattggttgactgaggaagagaagaccagaacctggcttactgatggctttacactttatgcaagccagaagtgggcagttacagcattacaactcctctcagggacaaccttgaaagatactggtaaagggaaacctttacagtgggtagaacttcaggtagtacacatggcattacaggttctttggaagaagaaatagccagatgtccaactgttcattgactcatgggctgggtgatcagggacttggaaagatcatgattggaaaattggtgaaaaagacatctgggaaaaagtatgtggatagatctctccaaataggcaaagactgtgtagatattatatgttccatgtaaatgcgcatcaaaaggtgacctcagccaaggaggagttcaataatcaagtggataagatgaccatttctgtggacaatcagcctctttccccagccattcctgtcattgctcaatgggcacgtgaacaaagtggccatggtggtcgagatggaggttatgcttgggctcagcaactcggacttccactcaccaaggctgacctgggtacagctgccgctgaatgccagatctgtcaacatcagagactgacattgagtcccagatatggcaccattccttgaggtgaccagacaggaatctggtggcaggttgattacattggaccacttcccacatggaaagacaaagttttgtttttactggaatagatatgtactggaatagatttgtactttgttcttactggttatggatttgcctttcctgcacataatgcttctgccaaaaccaccacccatggactcacagagtgctttattctccatcgtggcattccacacagtattgcttctgaccaaggaactcatttcatggccagataagtgtgacagtgggcccccaatcatggaattcactggtcttaccatgttcctcatcatcctgaagcagctagcctgatagaaagatggaatggccttttgaagttacagttccaattaggtggcagcagcatggaggactggggcagagtccttcagaaggcagtatttgctttgaataagcattcgatatatagtacagtttctcccatagccaggatccatgggtccaggaatcaaggggtacaaaagggaatagtttcactcactaccactcttatagtgatccattaggaaagtttttgcttcctattccctcaacccatagttcagctgtctagaagttttgattccagagcggggagtgctcctgctaggagccacacaaacattccattgaaccggaagctcagactcctcctcccaccccccagtcattttgggcttctaatgcccttaaaccagcaggctaagaaaggaatgacagtgttaggagcagaaagatccagactaccatggggaaattggattgcctctctacaatggaggtacaaaggattatgtctggagtgcaggagatcttttagggcatctcttagtattactatgtcctgtgattaaagtcaatgggaaactacaacagcctaattcaagaaggatgacaaacagcaaagactcatcagaaatgaaaatatgggtcactcctccaggaaaagagccaagacctgctgaggtgctttcagggagtggagaaaatacagaatgggtagtagaggaagataaataccatctaaggtcacatgactagttacagaaatgaggattataagtgacatggtgtttatgttttattttgttactaaaaggttgtttcccaaaggtcatttggctattctaaatttacaatgtgtgtgcagtttatatgagggatatgtatatcaagttaggtgtatttatggcctggttattgttttcagttgggctcgagatatgatttgtgttaactttacaagttaactattcccagttgttaacttgactatacctggaatgggctacagtctagaactggaggacacatctgtgatccagatcttgaggctggaagacataggcttttgatctggatcttgaagcatagtggtcatgaaaagcttattcccaggcaaggtaatacatggctttaattccaggagacagaggcaatcagatctctgaattcaaggccaacctgggacagagcaagttccaagtaaagaatagcttaggtccaggcatggtggtgttatctttaatctgggccacaccttctgctggagaccaacataaggacaatggaagaaggaaggattcctttttcttcatctgcttgcacttacttgccagcacatctgttggaacctacttattcaggattccagcttatacagaagaccagctaaaacaaccagccttgtgggactgagcaactattagattcttggtcttcccattcacagctgcccattgttggtttagttggatttaacactataagtcatttcaataatttcccttaaataatttccctaaagacatttcatatgttctgttactttagagaaccttgactaataaaactagctagaataaataattcatttaagtttcctcctgctttggcccctgagtgctagggttacagatgatagctatcacgctgagctcataattggataaatgcactttctatcatgcatggatggcacaatttgcttagagagcatctatgaaacacagagcactccagcaaaactgtatggaccaagcttcataatacttttcactagccaataacctcaagaggaagagattatttaccttcttatttcataaagaaaggaaccaaaatgctaagtgtgatttggcaaatgagtatggcacatttcctgttcacaggagacaacagagcaattgtgttttatttcaaacaagatcataccagaaaagcacaccaggtagtaaagaggcctcttggagggaatggttgacttagagctgatcaccagaaggcgaggctgcccaggtcctttgtaaaaaagaaataggacctccaaagtgtacatttaattcttctctttttaatgggctggagtgatggctcactggttaaaagcaatggttgctcttccaggggatcaaggtttgattctcagcacctgtatgggagctcacagccatctataattctagtcctaggagatctgaagccttttttttctgaccttcaagggtatcagtcacgcaagtggttcacaggtataaaacaggcaaaacacctaaacatagtaaagtaagtaagtaaggggctagagagatggatcaggggttaagagcattggctgctcttgcagagaacctgggttcaatttccagcaaccacaaggtggctcattactgtctataactctagtttcatgggattcaagaccctcttttagcctccataggtactaacaacatacatggttgtatacacacacacacatgcatatataaagacaatattcccatacatataaaataaataacaaaaatttaaaacggtgtttgtttgtttatgtgtgtatacacctgtcacagctctcatgtgggggggctgaggacaactttcaggaggttctcttcttccgccatgtgggtgtcagagagccgtatctctggccccacatctatattttaaaacaaggagaattagtttggaacttaaaattgatattgtaaactttggggcaattgttaagatctcttcagtttcttcttcctaaattatattctctctctctctctctctctctctctctctctctctctctctctctctctctctctgtgtgtgtgtgtgtgtgtgtgtgtgtgtgtgtgtgtaggtcagaggacaacttgtgggaattggttctcctttctaccaggtggtttctatggataaaattcaggttgccagccttggcagtaaacacatttacccatcaaaccatcttgctgacctaccccctgcctatcaaaagctgcttttttgaaatatgatagagtacaacctaagcaggcatgaaattgattatgtagtcaaggttgactttgaactcctgatcttcctgcctctgtcttctaaatgctggaattatagtacccagccattcttaaaatgtttgcctggatagagactacatttagatcccaaggcaatctagaaatatatgaaatagttgaataaaatcaaccacactgactagatatttgatgatatgaagaaaattttagcaaatgtgttagctttaacaatgatgtgtgcttatctgtacttagaatatttttggggtgcatattgaactactgagggcaaatcatataaatacttccattagcgttagcattatactctgctggaggtgatcaagtaacatgtgggctgtgtacatgttgtgtatgtgtggaaggtaggattgctggagttggttcaagaaactctctttagattttgttggctttaagacaaggtcccatgtaggccaggctgggatcaagtaggctttgtagccaaggatgaccttgaactcctgatcgccctgccttaatatacccagacttaaggttagaaatacgtgcctctacacccagacacttttctttttcttttgtcaattttccatgaaaaactgaaaaaataccttggcttcaatggctgataattttcctgagagtagagagaattaggaaaggctcatggcagggagaacattttctgccttgtagggccgggttagtaacgggaggtttactcttggccttaatccaggggtaactcataggaaaagaaacataagtttctagttgtaacaaaaacagaaggaagaaacagtattccatttacaaatttaagagggaaatcatggaactgagataattaattatgctgctataagctgagggctttgaatataaacaatatttggttgatcatcgctcactttctctttctactagctgatttccagatacagttccactgttggatatagcctccccaggagagaggaggagggagtgtatcagtctgtagagcccactcctgagcggtgacaaatggatcctcctgagaagctattgtttcagcttctgttgttttaattcctggacaaaaggtctcactcacagcttggggctggcctagaactcacaatagccccagtcagcctgaaattcagtttcaagcagatagccttgaactcactgtgtaactgagtctggcttctggagtgctgggatggtaggtaggccacaccaagcctgctttcatatggtaccactacaaatggagtccagctccagctcttaacttgctgttgtgttcatagcaagcagtttccttacatcacatttgctagaggtacccacaattgtatttcttgtcatttgcaaccaaaaaactttcattcctctcttgggaactgtgactaatgaagggaaagaggctggccagtgagcagaacagaagagagaccagaggagcagccagagaaggcttaacaaagaaccaatcccagcaggcggcaagcctgggaataggctgcaagagtgtccctgtgtcttgagtctatgatcttatacacgtggaatcccagcaccgggagcctgaagcaagaggagtaccataattctcaggcaagcctaggctaagaaatgagactgtctcaaaactcaaagaaaataaaactgataaaatagagcaggtctactttccatctaagtcccttcctggggtcaagccagaatagatccattgttgtagctacccactccccttctccaggatagggctagattttcattttacctgtcgcaccccctcatctgatatctcagtctggcccttgcttttctcggacactcaataaactgttcaaaagattgagaatttcaggtagggccgggcatgatagtacacgcctttaatcctagcacttgggaggtggaggcacgtagatttctgtgaatttgaggcaggttggtctacatagtgaattccaggaaagtcagaacaacatgtgagacactatttctaaaagccaaaacaaatagacaaacaaacaaacaaacaaaaatttcaggtgaagtcaaccatccataggtaattaaaacttgtcacacaaacatttcttctaaaatttcagctaggtttgtagtataaagtaattatataaagtggtttctttttaaacatgtgaatgtgaatttagacattcgaactaatacagatgctattggaagagtgctgtcaggctaggctgggcagtgcaaacctgtcatcccagcagtttggaggctgatactggaggattgcaaatttgaagctcgtctggattatacaggggcttcaaggatatagtctgggcagtttaggaagattaagtctttgaaacaaaaaaatgaaaagtgctaggtgctcgcccaaaattcttaaggatctaggttcgagccataaaaatagagcttcctattaaatcttctttaaagcagattaaacagaagatatcaaagcctgactaacttttctaaacattcatttccccttacatttctaaagtttagtctcagtaactctctcagcatcaaatgccggccttttctcattcaagggatagtctcatgaacagacttcaggtcagctacacacagacacacagacacacacacacagacacacacacacacacccctcttcactctcaaggtaattgtagagttaatctcttagtcaaggtatagagtaaagaaagggtccactatgacaatggaaaaagaaaatgtgatttatatacactatggcattactattcagcattttaagcaaaagaaattctgtcatttggccctggagaatactgttgagtgaaataaaccagatttctacagaaagataaatatcgcatgatcttatatatattacatgagatccatttccggatggatttcatttttgtgatgttattagaaagtctaatactgggtaatttattaataaaaaacccagaatttcatttctatagttccagaaataggatcaaactgctgtctggtcagagccaagtctctgcttgcaaggtgataccttgttgctgaaacctatgggtctcccatcatcatcatcaccaccaccaacaccaccaccaccaccaccaccaccaccatcaccaccaccatcaccaccaccaccatcaccaccaccaccatcaccatcaccacctccaccacctccaccatcataatccattacagagactctataatgtaaacacatgtcaagcctgcatgttggacactctgaatatatacaactatatttgttgatttaaaaaggaaagttttgggctggtgagatggctcagtgggtaagagcactggctgctcttccaaaggtcctgagttcaaatcccagcaaccacgtggtggctcacaaccatttgtaatgagatctgacaccttttggtgtgtctaaagatagcaacagtgtacttacacatagtaataaataaatctttgagccaaagtgagcagaggtcctgagttcaattctcagtagccacatgatgactcacaaccatttgtagttatagtgtactcatacacataaaataaataaataaatcttttttttttttttaaggaaagtgtcttagtcacggtttctattcctgcacaaacatgatgaccaagaagcaagttggggaggaaagggttttacatttctatactgctgttcatcactaaggaagtcaggactggaactcaagcaggtcaggaagcaggagctgatgcagaggccatggagggatgttccttactggcttgcttcccctggcttgctcagccagctctcttataaaaccaagattaccagcccagagatgctcccacccacaaggagcctttcccccttgatcactaattgagaaaatgccttacagttgtagctcatggaggcatttcctcaactgaagctcccttttctgtgataactccagctgtgtcaagttggcacaaaactagccagtacagaaagtttcccacgggttcaagatggcaagatgggatagcttgagaattaacccaagaaaaacatgaagggccttcaagggcagtagacatgtttgactcaaccataatgaaactaaatgaaattagagaattctagaaaatcaaatcattgttttgaaaaaggcaataaaacaaaaatcatgtagctagcctcaagtcataaactgtataactgcctttcccagtagtatccaccagttctctacaagagggtacaagtcaatatattttaaaagttagaattttaccattttgcaagtcctcggtgacataatgaattacagtggtgaacaggaaaagagggactacaaatcaaggcatccttgaagtaaaagcaaagtgcaccatgtgaaaattgagcttcaacttaattgggcctaagaaggaagagggacttgtcctaccacacagctgaaatccacagaatccaggcggcagaaaatgccaatgtccaaacaatttgcttttatctacaaataagttaaatgggaaaaagaagggaggctgttagtaaaaacaattgtgagatctgtcaaccaaatgcagtgtgatgagcccatttggatcctgatcttttttcccattaatttgcttatttattcactgcacatcccaattgcagcatcccctaccagtccctatcacttggctcttcctccatccctccctccccttctcctctgagaagggagaggttccccctgggtaccaatcctccctggtacctcaagtcactgcagtggatcctgatcttttaagaaaagatttattttatatttattagtatgtgtgtgtgcaactgtatgtatttgttattttttatttatttttatagttatctatgtttatgttagtttgttatgtaatagtatttatgttatcttttatagtatatgaaactttaggggagtattttttacttatgtgttcaaaaagctatgaagatcacaaaaactcaatcccttaaagcaaataaacatattgaaaaacgtgaaaataaagcagccttgaaccgagagtcactgaaacaaaagagtgtcacatctgacatgtaatacagcaatggttaacaattctcacagcctctaagtcatctgtgcaatcaaacagttcaccctgaagttctacgtcactgctcagtcaaatgggtcacagtgaaatagtaatcaatgttggatagttaatgaaaaatgaaaaaaaagaaaaggaggaaaggacatgattgcctttagggatgatggaaaagaaagtttgctatagataaaaaagaagacatagtcggaggcagacatatctgagagagtccagagtgaatgtgaccctgagtcatgggtgggggggcaggtgaagcagccagagaggcccaaaagaagaggggtaacaaaagtggctggattataatagggaagggtagctcttattatatacatgcagcttcctaggctgcagagttcagggtaggcaaaccaggaggaccctgtagggtaaaaattgaggatcctgggagaacctggctgccaggtccactttgatgtgttaaataggcacaccactatttgtcccaggtttgaaacctaacatcccagcctttttgttgataataaataaatgataaggggcaacatataatcttctaggactacttcctgctgacactgggaatcattttttgggctccaaggaagctggaatgctggcccattctgggaagagcaggttgtttcacccacagtccaggctgtggaggaccaactggggctagaaagatgttgtcaggttggagtagtgtgtgaggtgggatgggtgagactagtcactttgaaggtgtctgggatgcagattttgaggggacactgggagctggaaacttgctggagcagtctgcagttgatttgacatctgctgggacagatagaccagagacagaaggtaaagtgaagccgtgtaggggaaaattttatcttgggtgtacacttgaaagccgatagttgggggagggtagtcccaagaccaggggaaagatcctacattcaggaatagggaggtggggaaataggctattggttgacaggggtacttctctggagcccctttgacctgtcagaggacctgctcactccctgaagcatacaataatttttcaaatttatgaaaagagacaaaagtttaagatatattagcattactactgtttacaatctgtactgaaatctgcactgtataaaaagcagtagactcatgtctttgagtccaagtaaaagcttagggatgcaaacatgattttagattaaaagcattaacactctttttaaaggcctggcatatagattggatatagagagattttttattttattttttgcacaatgagaattttttaaaagtctatatttaggagacaaccaaagtatatttaaaatctcgagcttgtgactgtgataatattagtagtattttcccaggactagattaatagcttatcagaactccactgattaatgttaaaactatgaacttttgaagtcttagaataccagtagcatagaaagggaagaaatttgaacaagttctaatttttttttatatctatacaccttaaaataccttcttagaccctcacatttaagctttcacactctgggccccaagaaaaagcaaaagataacaaaaagatttaaaaaaaaaaaggaagacaatttacaaaattataggaaaattaaacaaaaaacaaacaaaaaaaccccctggttttagaagacagaactttcactcagttttcttcctggaagctagagtagagaacaggcgacccagtttatagtcagtctttactataaaggcctggtctttgctacttttcttctgttatgtccaaatacctgacaagaagctggccaaggaaagaagggcttattggcgctcacaacttgaagaaataatgtattgtcatgaaggtagatgcagatcaaagctggggctgggcgaggaaacaaaaaaaacagatcgaagtagactgaaatacacaaaccctgattattagatactgatttattgatggacttattacatcacctgtactgcctattcgccaagcacaactccacttgctacctggaacagaatgccctggaagaaataacaaaatgttatttaacaacctgctaactgtccttgcttttgttcactggtgacgtctcacttccattctcagtgctatcgaggtgcttattcaccttgtggaggtgtcatccctacaacaagatgaatgcttgtgctcattaggtctctaacctaataagtggctgagctgcctatttaacttatcaaagtagacctggcaccaggttctcccagccttcctcagtccctacatgctacgggatccttctgcctggcataccctgcactctgctctaaacttcttcagcccaggggcagggctgccctgtccccagatgaacttttctatataatccaactatttttgtttcctggcactttctatctaccctttaccctcctcatctcttggccggtgtcttggcccaggccatgctcttggtcggcagctcctctcttgttctccctccctgtctctccttacatggccccgctctgtagggccatgttcactctggactctccctctgcctatgcgctcccttttacctacaataaaccttctcctccactatacctaggagcagatatgtcctttccttttttattcattcattcattgctcacgtttccttttcttctccttttccacctgggatggctattcttggttgttaacttgattacacctggaattaactaaccccccaaaacgcataggcatacttgtgaggaatgttttgcttttgaagtgggaagatccacttctttttgtttgtttttgagatagggtttcactatgtaggtactagaacttgctttgtagactaggccagccttgaactcagagatccatctgccttctgagtgctgggattacaggagtgcactattacataccactgggaagacatgtcctttatccagatcttttaagatgggggggggggcgcacccacctctaatcagggccatgacttctgttggcagcctatataaagaacatggaagaaggaagtttactcttcttacatgtttgttcttgatctccctagcaagtccattccttactggtattagagactacttcttcaggactctagcatataatgaagacaagtgagacatccagcctgtggagtgaacaactactagattcttggaccttttataggtagtcagccatcattgaaccagctggattacagcctgtaaatcattctaataaactctctatataatatgtatcataccccctatatgtaaatacatatatatttatgtcttagttagggctttactgctgtggacagacactgtgaccaaggcaaatcttataaaggacaacatttaattggagctggcttacaggttcagaggttcactccattatcatcaaggtaggagcatggcagcatctaggcaggcatggtgcaggaagagctgagagttctatgtcttcatctgaaggctgctagcagaatacagacttccaaacagctaaagtgagggttttaagcccatacccacagtaacatatgacacacctactccaacaaggccagatctcttaatactgacacttcccgggccaagcatatacaaaccatcacaatttatatttttatatttccataatacatattttcattctataaatcctgctcccatagcgaacgctaactaatataccacacaagtccaaagcttgtgcagatggtgccacccttgttcagggtgactctttcctcttcagtaaatcctgtctcaaactctttcacagacaaacagaattatgcctccgtctcctagatgattctagacccattcgagtagacagtgaagactcaccatcacagaaccctcattgcttttttcaatccatggcttaatataggttgttctggccagaaagtcattcctccctcaatttagccaatgtgagaggccatgcaatggtataggctcctttttataacataggaagcatttaggatgcaactaatatgtaaccagcctagtgatagaagggtgattgtggccacaacaattgttctttctacgtattgattatatgtcaactaggagcccagcaatactgtgcttgagctattatcatatggagagacagaagtatgaatatggataacagaactcctccattcaaggcttagggaacatcttacaagagagggtggaaagattttaaaagctagaaatgtatgctgcgagcttctgtcacttagatgctacagctttgacacctcaacaaaatggctgccaaacaatgacaacactaatatatatactaatatgaaggtagaaacctcacagggtctctgccctatacaactacaaacaatttaaaaactaccgagagaggaagaattaatctcctccagagatgaaccacctaactaactatacaataacaagtggttagccctgaaatcatgttcacacaagcaacgctaaatagacccagcaagttgtgtttatatatttgtacacttatatgtatgtagcaataataagtaaagaaaaagagaccatgaatctgagaaggagtagaagagagagggtatgaaaggggtcagttgggagaaagagaggggtggagagatgatgtagtattttaatcaaaaataaaaaatagcaggaaagactttgaagaaatccaaagcaagtatctaagaattgtgagtctgctgctgattatccatactgagtgccagataaatatggtagtggatgctccatgtcataacttcaacctcaacaacctacgtaggtggcactattttcctgttacagatatggagactggggcttaaagaggagaggttctgatctgtacctggagctgaccctgtgccacagcatttagtaactaaatcccactggtagagagctggtctccaaggagtgcacagctcctaagaggacaggtgagaccaccacttctgcttaaattcctggcccaagagggacctccccagagtcctcaggacacagaaacagaggagcagccagggacaggattcttccagtttttgtctgttccccagacttgaccctatgtcacagctttccgtacccaaattccccccagagagaactggtctcccaggagtactgacacacaggcttgaaggaggggcaagccacagtcagagacagcaagaccagttaacaccacaaataaccagatggtgagaggcaaatgcaagaaaataagcaacagaaaccaaggctactaggcatcatcagaacccacttctcctaccacagcaagcctggataccgcaacacatcagaaaaacaagtctccgacttaaaatcacatctcatgatgatgatataggacattaagaaggacataaataactcccttaaagaaatacaggagaacacaggtaaataggtagaagcccttagagaggaaacacaaataccccttaaagaattacaggaaaacacaaccaaacaggtgaaggaattgaataaaaccatccaggatataaaaaatggaaatagaagcaataaagaaagggagacaaccctggagatagaaaacctaggaaagagatcagtagtcatagatgcaagcaccaccaacagaatataagagatagaagagagaatctcaggggcaggaaataccatagaaaacattggcacaacagtcaaagaaaatgcaaaaagctcctaacccaaaacatccacgaaattcaggacacaataagaagaccaaatgcaagaataatgggtatagaagagattggatattcccaacttaaagggccagttaacatcttcaacaaaattatagaagaaagcttccctaacctaacaaaagagatgccaataaacatagaagaagctttcaaaactccaaatagattggaccagaaaagaaattcctcccatcacataactgtcaaaacacgaaatgcacaaaacaaagaatattaaaagcagtaagggaaaaaggtcaagtaacatataaaggcagacctattagaattacaccagacttttcaccagagactatgaaagccagaagatcctgggaagatgtcatacataccccaagagaacacaaatgccagctcaggttactatacccagcaaaactctcagttaccatagatggagaaaccaagatattccatgacaaaaccaaatttacatgatatttctccacaaatccagccctacaaaggataataaatggtaaactctaacacaaggagggaaactataccctagaaaaagtaatcttctttcaacaaacccaaaagaagataaccacacaaacataatttgacctctatcaacaaaaataacaggaagcaacaatcactattccttaatatctcttaattcagcagttcctcagaaaattgaacatagtactacctgaggacccagctacactactcctgagcatatacccagaagatgctccaacatgtaataagggcacatgcttcactatgttcatagcatatgaaacaacccatatgtccctcaacagaagaatggttacagaaaaatcagaaaatgtggttcatttacacaatggagtactactcagctgttaaaacaatgactcatgaaattcacaggcaaatggatggatctagaaaatatcatcctgagtgaggtaactgattcacaaaagaacacacatggtatgcactcactgttaagtgggtattaggcaaagagtgtggaatacccatgaaacaactcacagaccacatgaagctcaagaggaagaccaaagaatggatgcttcagtcctacttagaaggaggaacaatatagtcaagggaagtacagggtgggaggaggaaaggaaggggagaggaaaaagaagggcagaattaggtataggaggaaatgtacaaagggtcaggaaattgaacaaaggtgtgtggcaatgagggatggggaactggggtagaaaccagaaagtcacagatgccaggaaagcaagagcctcccaggacccacaaggaagacattagctgaaatactccacaaaggagagggagaacctgtcgagaccacatccagaggttaggcatggcacccctggttgagggatggggccacccacccatctccaaaaatttaacccagaatttctcctgtctaaaggaaatacagtgacaaagtgtggagcagagactgaaggaaaggccatccagagactgccccacctggggatccatctcacatacagacaccaaacccagacactattgctgatgccaagaagtgcttgctgacaggagcctgatatagctgtctcccgagaggctctgccagaacctgaccaatacagatgttgatgcttgtagccacccattggactgagcacagggaccccaatagaagaattagaggaaagactaaatgagctgaaggggtcttacctggcatcaatgggagggaaggcccttggtcctgagaaggcttgatgccccagtgtagaggaatgctagggcagtgaggcgggagtgggtgggtggtgggaaagcatcctcctagaaacagggtaaggggggatgggatagggggtttgcagaggggaaaccaggaaaggggataacatttgaaatgtaaacaaataaaatagccaattttttttaaaaagaggagaggttcatacagtaagtgttatggctaattctgtcagtctgacagggtctacagtaccaaggagactggcctcaagtcacatctgattcaagaaattatttagactaggttagcctctgggcgagcctgtgattaggtaggaagtaggaagaaccacactatagaaacttcctctatctcgaagtgctcctggctgtcttctctacccccaaacacacagatggtttacctttgtagaatgtcctgtcactgtgtcattcaatcactgtgacattcaatctagactcttccccaggacgaacctgtgtcataaaaaaaaaaagggactttacttttggtggggcttaaggtgacattactaagtctgctgcttcaagctgtttctcactgtgtctgccccagagatccccctgtctccacatctccaactccaggattacaagtgtgcaccgccataggcttggcttttttaatgtgaattctggggatcaaactcagattctttttcttgcttcgtagatatcttgcttggtagacacttgactgaatcacccatctcctcagccctcttactgttcttaatgcctcacggtgcctaacttataagttaaatactttccctctctgtttctctgtctctctgtctctctctgtctctctgtctctctgtctctctctctctctgtctctctgtctctctctctctctgtctctctctctttctgtctctctctctctcgtgtgtgtgtgtgtgtgtgtgtgtgtgtgtgtgtgtgtgtacgtgtacacagggaaaaacatagatgaatttgtatcacgaggtaggctttctataagcctaggaaggtcaggggctgcccgtgccccgtgaagcaaggtgtggattggatctctctcaaaaccccaggaagaaaacattctacccacacgtcagcctgacatttctgccttccaaatccatgaaagtgggcagtgcatgaacatccatgtcctcacgtggcttctgagtttgtgggcattttcctctccactaacggttgaaagctgtgatgagaaaagactagtgtacaccatgctgtcaaaatgacagcttatatggacacctcttgattccaagagtttggctgcaaggatccaatcttatcaaagaagcctttcatgcccaggatgcaactttgtgatttctttttatcacggcttgcactcaggtgtggtacctgccctggtgcttagctttcagttatctccccttgcttctcagttgttcctgtccacctttgtcccttttgacacactgacattccttggagtgaacttgaattccataaaagaactttctcccagtcacgtctctctttcaatccatctctcccaacttttcttcctcccttcctcaaaaagctaaggcagaaggactgctgtgagttcaaagccaccctaggctacactgagagttgttatcttaaaaatgaaaccaaacataaccaaacaccccaccaccaccaccaccagcagcaacaacaaatataatttatatatttttatattctaggggaacttactctcgaagtataatttcttagttgaaggatacttgcatttatttttttaaagatttatttacctatttttactttatgtgagagaatttgactgcatgtgtggatatgcaccgtttggatacagtgctcatggaggccagaagtggacatcagaacccctggaacaggagggcagttaggctctaccgtgtgggtgctgggaaattaatacagatgctataggccaatatgaaaaatgactcagttcatgttaactgcctggggccaggggagatcagctgagtaataggataatttttcagtgtgttcctttatgtctaaaaagagctgctggctctggacaacctagctgaggagactgagccagcctgtggtagcgttggcattccagctactcagaggctcgtggagactgttctggctttcagtatgcacacccccaatctccttgcaaacttaggcaactggtatacatttctctctcgctcctggcctcagtaggccctctttgcttagagggccacatattctgtagtcctgtgacagagtcacggctcacctcttctgcagtgttctacatcaggagtgctttacagctagaacctgacttcctctaaggcatacggtacacaaactctgagggacacacaaactgaactggttaccttcatgttgcgctaacctgaaaagatgcagtctaaagaagggtttactatgccttacagcagcactatctgtggtttgagggtacagtttgttggcatttcatttaagctctgccccagttatctggcaacagccaggtgtgcctaactcactataaaaggggctgcttgccccctctctctcccttgctcttactctcttcttttctccttttgctcctgttccctcttcctcctcactccacgtgctcatcacttgcttctactcctcttttcctctccctctgtctctccctctccctctctctttctgcttttctctcaactcccctctccgtgccctgaacaaactattctatactataccgtgtgtggctggtaactcaaggtgaagggatgccgcagcatgggcctgcagagacacccctttcccccacaccatacctgcctccaccaaacgtattccttccttcttatctttttataaaatacaacacagtccatcatggagaggaagacatggcaacagaagcttgaggctgcttactcacataggacaggtcaaggaaacaaagacagacctggaagcagggccagctaataaaccttgaggtccatcccccagagatccacttccttgaaacagcaccaccaatctggggataaagttttcaaacacttgggccgtagggggacatgcaaatctggttctgactgtgcctagccagggctgtacagtaatgaggttgctcagactctgtgtgctctgctaggaccctgtgttttacatgacgttactggcatgtgtgacctctaacatgacaatacctgaaaaggttttactttgtattagtagaaatcaaaggattactgaaataagtgtgtgtgcgcgtgtgtgtcaataaattcatcattattaagcagtttacattcttgtgtgtctagtgataggggtcctttccagacacctatgtgtggataatttgtgggacccaggcttccttttaacctggtgccttgcctctgagaagaattccaaagagaacgggctaggtggatgacctgcagtggcagaccattggcagaggaagtggatctctgcccttgtctcaaaaggcactgatgagaagcggtgacaggactggaaacagagctcaccctttccctcaatgacccacatcttccagctgggtcccacagcccacaggctccacacccccagcaaggccactactacctctgccctgctccattgtctttacaaactcccactcagactcatgggaaggtacaaagtgagaagagtggctttcatggtctaagaagcctgtgggcagggtcacagacaacagcccagccccactggggaaagagcccacgaggcattcttatctctgtgaagccttttgtaggaggctgtagcctccccttaggctgcccgagctgcacctgaaagatggcacctgctggatgcagagctggtggtgtaaacaagtccatatttggtgaagatgcgcccctgtcgccctgattggctgaagctgtgtgcctggtgaggtgacgtggcctgctgtgagtggatgggggctgagagtatataagagtgagaggctccgggttcaggggagagagatgaagaggaagagagatgaagactgaagattgctgaataaactgctgatagaagaactcattcttgctggtcgagggcggatgcgacagcctttctttttatgtcttaacaggaagatatctggtcaagtggatgagcgtggtataaaattgagacctgtagaaccatgaggaatgacatactcatctaacctggactctcacgcttagagttatgaatcatacatcttttttcttttcaatccttaacacactaggggaggggagataaggaggaggaaagaaaagaagttatattcatacttaacaaaatattcatctcatttaaatgaaaaaaatagagtcactgtaggcttgggagatagttcatttgataaaatgcttgccttccatctccagctcctgaattcaatgcccagacaccacgtaagagaagctgtccttgctcaaagttccagctctggtgaagtagagacaagcagatctctagggttttctgggcagcgagccttgcatatttcacaagttccaggacagtgagaagccctgtgttacaataaaacaatgacatctgaggaatggcactcagggttgtcctgtggtcactacatacttttaaccctcccagggcgaatgcactaagaatctatgatggggatgggggaggtggaggtacaggctatgacatgtttcttaccataaccctaaccatttgaacttaacagttatctgcaaaagtttcatttacaaaggaatccatgctggcacagaaacaaagttctaggtagcatacaaactttctaggcttcctgaggaagctccatcctctctgtgctgtgaagagccagtataagcatgttcccaggcccaacccatgcttttcctactggaatgccagattctaccagatcagttcacagatagctcaacagaagaggaaataagagaactcacttaaacgtctgtttcttgaggccacaactgcaatgcaaacacaagtctttgcttaagagttttcagcccccaagccccttcaacagggtgtgttggcacttgccgaggaagtgtaatgttgcttcctgtttgatgctaaccacagccagcctgagagttcccagaaactgctctgctggttttgaatggcaggatgctatcacaacggagaaagtggtgatgggcaggattgtctgaacgctatttaaaagtgtgacccagtctttgcctcaaagcaagaggactgaggagtttcattaagaaagagaatgaagaactggtatgttggcttgcttgacaaatgacattatattattcagttcaatgtttactttttttttctagctacatatcaaaatcttagagtgggattcatagttgatgcttcctgattacattggtggcaatctagccaagtccttctttgaaatatattgggcacattgttcatacctatggggttgagctgttgtgggagtctttctggaataagcactctggaagagagttgtcacggtggactaaagccaggatagctcctaaaaggccttggtcctacgtccagtttgccttctcattccgtactctaaaactacaaggcagagtattgagtgttcatgttggtggatttttcctttgatgagtatgaaatgtcttttcttatcttttttgataacttttagttaaaagtcaattttattcaatactggaatggctgctccagcttgtttcttgggaccatttgcttggaaaaattttttcctgccctttcctctgtggtagtgtctgtcttagtcactgagtgggtttcctgtatgcagcaaaatgctgggttctgtttacatatccagtctgtcagtagttttttttttttttattggagaattgaatccatttgtgttaggagatattaagtaaaagtgattgttgatttctgttattaaatatggaactatgtttgtgttgttttcttcttttgggtttgttgaaagaagatgactttgctctccctagggtttcccttcgtgtgttggagttttccatctcttattctttgtagagctgtagttctggaacgatattgcataaatttgtttttgtcatggagtatattagtttctccatctatgttaattgagagttttgttgggtgtagtatttgtgttcttttagggtctgtatgacatctgcccagcatcttctggcttttattatctctggtgtgatgtctggttaattctaattggtgtgcctctttacttacttgacatttttaccttaccacttttaatattctttctttgttttgtgcatttggtgttttgatttttatgttatgggaggaatttcttttctggtcctgtctatttggaggtctgtaggcttctttgacctagcccactcagtcagtcaacaggtgctccagcgctgaagtgaggattaaaacgaaatcagacaattagacattgtagcatgaccccagtcaattgtgagactgaaggcaggtttatcgttcccaatctgcttttataccattttaattacatgcaaatattaagggcaagtaatataatatggaactagcaaggtaataagaaaagtcccttgattactcccatggcagttgtttccaagggcttgtcaggatgaccaaaatatctgagcccacttccttgtccaaacacaaaatcttgcctgaaacctacttctttttgttctaccacagtcagcagctcattaaggggaacagcccattgcatcagctgtttctctagatcaatctgctccaggtagcaatcgaagttatacttggaagtgagcaaggtcctgctaggaatgctagctaggaatcagcgctctaatcaaatcactagatggtccaaccaaccagcatctagtgattggacttttctaccttttctgttctgttctttcctcttcacctttacaacaccttgagaatctaccttgaagcaatgagatgttactcttggcatactaccctcatagttcccatttgtacctctagcctgactgcttttaaatgacttttgacatttcctgtactattcctgattgattagaataaaaagagcattgctcatctaaaaccatgcacgttcctcccttgtcagctgtagtcaagtctgatcctttgtgattttggaggaccattgctgtacaggaatctctccagttctaagagtgactgggttttcctcaacaattgtttgtttgatccgagtagagaggtggctatgttggatttgttgggtgtctattgcaatggcactggtggtcacggacccagccagggctattcctagcaggactacaaaaagtacaggggtttcttatttcttggatctaagggatgcaagtactgatggacctcatttcctgggagcgcaggtaagtcgggaccaagaatacgatttcacaactgattcctgggcagcaggtataaataccctcagagcaggagaagtatgtcccattagaaaccactcttctttttaatgagtctggtacaacccgttttcttttccaccactgggctttttctaggaactgaccaggtggcccagttaaatgcatcccctttgtgttttaagctgggctttggctaatcattcccacttcagtataagtaacctggtttgcatgtaaacagaccccacagtcctgacctaggttaaggagctcatggacagcacttactgaagccagcattttgagacattatttccccacatgaaaggcttctctatggtcagttcccatgttttttctcccccaagaaccattacagctttaactccttgtccctctgtcggcgctcctttccaggttctttttgtggcaaagtccacatgtcgcttctaatatcaataagctctctgacaatctttctctgtcctctggtcacttatctatagggtatcactaccagggaccattgccaaaaggaatcacagtctgtttttccagcatacgcagtgcgatgtggttcaaggagtgatctgggactggcccagtcccaagtaccacctgatgtgtttataaaaagataaagaaaggggcagtgatatgttctgtggaggtgtggtgaggtgtggaagaaggggggtgcctctgtgggtccatgttgaggcatcctttccccctgaagggccagccacatgatggtatagtatagaataaagttaattcagggtatggggaggggagttaagagggtagtagaggccgagaaaggcaggaggcagggaagagtagagtagtagaggctggccatgagtttgtggagagagaagggggaaggaaatggggagagagtggtggccgggaaagcaagagcaagagaggtgcaagaaagcaagagaggggagcaagcagccccttttatagcatcaggcacacctgactgttgtcaggtaactgtcaggcagagcttagacagaatgctaacaccaccacctgaaggagataaggcagaccgtctcttggggacagttagctatattgatgggttttcgggaatgggagttgccctgggacagggttttctctagattaatggacaagatggaagaggctgagtaggggctggctcagatgtacctcaagaccaggaaggacattaagaggactggagccatcatttctattcccaggtctttttgagatggtcagtttcagaggttggtctggcttggctcttgccaaccagtccacggtagccttggcgtgggggtggtgtatccatggattgaactttaggggttaaggaagggcgaggattcgacttgtttgtatgtgtgtagtgtcagctaagtctttcaagaactgctggaagcaggtgtgtctgtattctcagaagtctcctgagtcctttgggagttggggaggtggatggccaaacataatctcaaaaagagagtaactgcctttatagcacaggcaatgcaccctaaacagtgcaatcagcacaattcccagccaagggaaggaggtctgtttcttagccatgtttggccagtaccaggcttttatttattttttattttagatattttctttatttacatttcaaatgtttccccctttcctagtttcttctctgaaaatcccctatctaccccccccccccccgcttcctggccctggcattcccctctcaacagaggaatggatacagaaaatgtggtacattaacacaatggagtacaactcagctattaaaaacaatgaatatatgaaattcttaggcaaatggatggacctggaggatatcatcctgaatgaggtaacccaatcacaaaagaacacacgtgatatgcactcagtgataagtggatattagccaagaagcatggaatacccaagatacaattcagtgccattttttaatagttctatttcttctctcaatctagtcttacgactgggtggtactgtgtgtggaagttccaagctaattgtctgtgccaggaggaaagacctctatgcaggttgaaaaaggcacacaatcaccagcaagtattagtcccctctgctgggctgaatgtcagtaaagtccactttctttcttttttttattaaaaaggtattttttattataaatacattttagttgtagcagtaaaatacattttgtgttaccatgaatcttttaaaacaaaataacttcactgacaagggtcacaccgtagactactgggctcaaaaaaaaaaaaaaaaaaaaaaaaaaccaaccaaacaaacaaaaaaaacaaaacaaaacaaaccaaaccaaaaaaaaacatgtcctaagaaagtagcataagctaaggggactccaaaacccaagttaggaaagaggaagaacagagaaaagaagccttggtggctagctttgggggttatcttataatacagaaccatctttatttacttttaagaataaactcttccggtattagagcctctcagacgagacatggtataccgcaaaggaacagagtcactgttgtattttgccatagattatgctgaatcagatgctgcgtaagtggtgcttgtaaggtaaatggaccagagtggttttacatacggctttcccaatagaagacccagaatgaatctactgtgtgacggatcctatacattactgatcacttttagagaattgtattttaaaaaaaacattaaaaataaagctcctgtatcactgacaatcaggactctttactaaaatgcaaaccccattagctttataattcagagaaagtatttggaccactctattctcccgggatgcaactattacctataaccagtacctttatgggtctcaaagaatcaggtcagatggctggcacagaaatcagatacagtacttgatgtatataatgtcatatacatggatagatagaagcagtcaccttcctgatacatggaaatcagggacccttgtggggggtgtcattgagaaacaatcttaggtacaactgacactttgggacttcaacctggacaaaagagtcctctgacctcctgaaagatacaaagtggtatcatgcaaggcaaatcgcaaataaaccaaagtctcttataagctgggagtgcatcgaggaaagctgtgctgagcacaccagcaacccgcagctagagcttcctgggccttttatgtaggaagtcctgggggctaagaactctaaagctgtgtattctatgatggtcactgtgtattatacttctacgcctatgccattctacattctattaccttaaaaatagatttgttttcttgctagcaacccagtaaattcaaagccagactagaaaccagaaagcagaacccaatacccgccaagctgcagcccaggctgaacattaaacacaacacacaaatgtaaaactatccaaagacctatcaggttgattacgttgtaatctcaaaactaacgtgctcacccatgtctgctatgacttaggagtcactcatgctatgcgggtggtgtgttccctcaactcttctgcaaaaatacagaggtcttcaaggtagctaaggagtcagaaacaattgcttctttcctgccacatacaacacccaggcagtggtgggagcctggcaatgcaccattgccactgcccggggcccagcagcttcaaggatgtgatctctgttttaatttctttgcctcctgacgtaagtagccccctatctcgatattgtcctgctttgatattgtcctcttgttgtgagaggctctccccctgttgcaggcttcagctccatcaataaaaatttttgaattggggagtggctagtccttcaagtctggtgtatgaggagaaaatctcttttataatgtctccaggacgacggaggggctcttccttctgttcaggcaagcatgtggccagataacacagcttggatgaagaaggacctggagtttccctcagtggcaggcagatgccgatggagggacacaatctggtggtcttgcatctgccttggttccttgtgagcctggcaatctgaggtagcatcccagcaagctctcctcctctggggaagataatgagggctttcttcaggcttaacaggcttttcaggactgtgaaggtctcacacaggactatgtagcccccgtgaccacaatagttcctaaggagaagttggggtggggtgtatgcttagacctaactctgtggtgcatagggtaagctggagacatccagcttctccttcaagaaggtgcctgcttgactgccacattgttccaaattaggagctcttacctggggccatatgccccaatgtatcgcttcctattaggaaaggtaagattttcttcaggtaaaatgacctcaattgaaccacaggttggagcccaatcaaatcctataaccacagaattgggggtggggttgtcgcattacaaaccttcacagatttgctcaccatccctttagaaggatccattctcatattaaatgactagtctatgtatttctctgaggccaataccagtgcctcagtattcctttgaggcttttccgtgaagacgtaggccaccttagtatcctactgaggcttcagatacaatcttttgcaaggtgagctaacctgtattagctcttcgtgcctgtcttcatagcccagtctcatctttttccacttgaagactccagtcctgggtctcaaagacctcttggccactggaagaggacctccgaattccattggaggtctagctttctggttctagggatcttcactgtgctgcaaggctcaagagctacagcttctccaaaccaactggagaagtggtgaaggagatctggctgggggacctccagaaatgttgtgagagtctttccagaataagcactttgacaccagtgagtctggaggagggagatgtccctggtggaccaaagccaggacagctcctgaaaggtctcgggcccagtatagtttgtattctatatgcaaaactcacagacgggcatgggcatgcaaacaagattttacagaagcatatgtggcagttagcaggttaaaggcaacagcccattgtttcagtggtttctccaggtcactctgttccaagtaacatatagtgaagttttgcttggcatgacagacagtgctctaagtaggcaactaactaaataaatcaataacccagtgtctaataataggtctttcctaccagattctacttctcagcaggcacttcagggcacatgtacagagtaccacacatcagcttggtataaacttgattcctacactcatcatatacgaaaattaatttaaaatgagtcaagattgaagtgtgagatctacaactgtagaatgactagactcatttaataaaaatcaggatgcaggcctgagcaaagattttgagagcatgatctcaaatgcaagaagtaaaagttgacaaccaagattaaatcaaacaatgaagcttccatacggcaatgggaacagctaagtgacagcctttaggacggaagaaagcatttgcagatgacttacctaacaagagctcgatgtccagaatatatgaatataagctgctcaacagagaaaattaggtcatgcagctaagaacaaatgagctggctaatgagctctcaaaagagctatgcaaatgcctaaaacatgcctgagagtcttttaatcacaatcagcactcatcaggagggaaatgctaattagaaagtctgtgagatagtttctctagtgaacctggctcttatcaaacatacaaaaataataaatgctggggtcttgcagagaaagagaggtgtccttttgtgtttgacttatttcactctgcacgctttagttcagttttcccctgatgaaaagcaggtcagaattttgttcatatatatatatatagttatatatttcaatatataaaatcacacatatatatattcaaatattttcaaatataaatatatgtatgaacaatatagttatgatacacacacacacaccatgtgctgttcatccatttgtttattgatagagacttggaccttttccgccttttggctattataaatggtgaacacagatgtgtaactctctattggggtcttcgctttgagttcttttggaatatacatacatatatatgtatgtgtacatatatatgtatatatatacatatagtttacttgtctattaatcttctataattcatctacctattgtctataaatcacctaatatatgtatcatctacctattatctatatatatttgtctactatatatatatctgttatctatcacctctaatgtatctattatcattattacctataacttattattcatctattattataatctatcatctattatcatctatctaggattaaacttccagtttatctttatcattttttttaaaaaagcttcttcctgtagtcctagaatccaggaggttgaggctggaggactgccatgagttagaagctaacttagactaaatactgaattctagcccttcctaggctacatagcaagactgttgcaaacaagcaaacaagagctccagaacagcccccatttactgctgcttgactttctgactagtttattgggtcttatatctaccaccattctccaccccaatcccttccaacccccaccccaacagttggcagatgagaaagaaggttagagggaaaaaaggatgtagacttctttaaactacttcctgctgatcaagcatcaagttccttagggcaagttcaacctttgctgtcaggatatttccaaccagcaaccagcaattcagcaaaatagaaatcaaaacagaaatcaacagcctgcaaaagcagcagcagccaggaccagcagcagctgcagcagccttcgtgactctggaatttttaagcccttacaagaatccccagagttccaaacttacactatcttcagctggcaaaagcatgcccctgccaaagcatgaggcaaatcatagtcagttgctttggactctgaagtggccccatatcccacacttgggattaaaacaaaacacatccacataacatgactgagtttttaaggaaaacagatgagagatgcatgcagtgcaatggtctgccaacttctgtgtttgactttgggaggagtgccagtgcttggccattcttcttttgtgaatggatgctctctctttagactaatgcaagagcaggatcatctaccctgcaccagcccaaatgggctaaagttctcattttggaggtttcagaaatatctctggatcttcccagcaggttctgcacataacaccacctctctttactggcggagtaaataagcctttagattattttcatcttatcacacagtaaggcgggggtgggcctgtggcatgggagggagctgggcacatggcaggggagggggttctccctgggagtccccttagcagcaccccaggcttgcagactagacaaactagatgtctcagagcactttctttgtgttagtttgtgggaggtgaatggagcggacagtgtctccttgtccttcctctcctcctcctcttctccctcttccttcctctcctctcctcttcactccttcatcttcttggttttgcttttgttttggggtttggtttggtttgtttgtttgtttgtttgtttatttattttaaaggcaaagtatttctatgtacttctggcttaccctagaactcactgtgtatcctgggctggacttgagtttaatatgtagaccaggctggcctcaaactcaaactcctgtctcagtttgctaagtgctgggactataggcatgaactaactatcaggcctagtgtgtaggattacttggcactttgggagaagggggtggtgtcagtcatcagcatataacttttctcattgttctttcgaaacaattattaggtccattgactgagaactggagtttttctccaggtaaagaaatgttctcctgtggtttccctaaccctgtcttcatttgcctttctgtgttctctgaacgcccctgtacaaaccatggatccaggtgctccttcctgctgctaagcttggtgttggcgtctctgctacttaagtctttgatgtcccctggatttgccttgactatcataactttcaagaatttgttttattttctctctttttttttttcctttactgctcctgcttcacttataaaaccccctttcctgggagatttcaagaaaatttataattctacatttcatctgcagtaggaaatgcaatgcttattctatttatttatttaatttattttggggtcttatgcagcccaggatcacctcaaaaagtcactatgtagctggtcttgagctcttcacccccctgccttcacctctggagtgcagtgggttcaggtatacaccatcgcacccactacactgtttttgttttcagttctgagtgacttttgtatgtcttgggtgccctggctctggtttctctctggttggtgactatcaccaggctgattttggatccgccagctctaaataacaacctaaggacttcttaatatttatgaaagcttagacagtatagctgggtagactcccagctagttcatacaaattaaaccctactattcctggcctaagccctgccccacgtcctgtcacctctccctcagtcccagctccgttccttccgcctccatgtgacactagcaaagcttccccagccagattcttctcccagagaccctctctcagcctggaagacccatcttccctttcctgcctagttattggccattggctccttattaaaccaatcagtgagtgctttccgaaggtgaggaagtgtgccccaacacatagtgtaccccaacaggtgatctcacactcacacccacttccccgcacctcatcctggtccagacatgaatgcagctctttcttctgtgctccctaaatggcactggtactattcaaccttggtggcacactttgatgaggcctggggagtggggaaggggagaaggcttggaatcctagtcccctagagagcatcagcttgttcttaagaggcctccaccctcatccccacatcctggctgtctgagctcccttttctgaatcccattgtcatccttgtccttttgataaataagctaagtaaaaaaaaagtcacaaaatttgtcttcccatttctgggaattcagaaggtttctgcctttaatacactttgccaagttttccgtttcctttattaaaatctgatggagctgtatttttacgatggggattcaatgtgttattcccagcagctaattatccttacatgcctagtcttcctcttttttttcttctacccaaacatttatttcttctttttaaaattttttttattacatattttcctcaattacatttccaatgctatcccaaaaagcctcccactccccccaaccccctacccacccattcccattttttggccctggcgttcccctgtactgggcatataaagtttgcaagtccaatgggcctctctttccagtgatggccgactaggccatcttttgatatatatgcagctagagtcaagagctccggggtactggttagttcataatgttgcacctacagggttgcagatccctttagctccttgtgtactttctctagctcctccattgggggccctgtgatccattcaatagttgattgtgagcatccacttctgtgtttgttaggccccggcctagtctcacaagagacggctatatcacagtccttgcaccaaatgcttgttagtgtatgcaatggtgtcatcatttggaggctaattatgggatggatccctggatatggcagtctcttgatggtccatccttttgtctcagctccaaactttgtctctgtaactccttccatgggtgattgtttccaattctaagaaggggcaaagtgtccacactttggtcttcattcttcttcagtttcatgtgttttgcaaattgtaccttatatctcaatatattaagtttctgggctaatatccacttatcagtgagtacatattatttgagttcttttgtgattgtgttacctcactcaggatgatgctgtccaggtccatccatttgcctaggaatttcataaatttattctttttaatagctgagtagtactccattgtgtagatgtaccacatttttttgtatccattcctctgttgaggggcatctgggttctttccagcttctggctattataaataaggctgctatgaacatagtggagcatgtgtccttcttaccagttgggacatcttctggatatatgcccaggagaggtattgcgggatcttccggtattactatgtccaattttctgaggaaccaccagactgatttccagagtggttgtacaagcttgcaatcccaccaacaatggaggagtgttcctctttctccacatcctcgccagcatctgctgtcacctgaatttttgatcttagccattctgactggtgtgaggtagaatctcagggttgttttgatttgcatttccctgatgattaaggatgttgaacattttttcaggtgcttctctgccattcaatattcctcgggtgagaattctttgtttagctctgagccccattttttaatggggttatttgattttctggagtccaccttcttgagttctttatatatattggatattagtcccctatctgatttaggataggtaaagatcccttcccaatctgttagtggactttttgtcttattgacggtgttgccttacagaagctttgcagtttcatgaggtcccatttgtcaattctcgatcttacagcacaagccattgctgttctattcaagattttttcccctgtgcccatatcttcaaggctttttcccactttctcctctataagtttcagtgtctctggttttatgtgaagttccttgatccacttagatttgaccttagtacaaggacataggaatggatcgattcccattcttctacatgataacaaccagttgtgccagcaccatttgttgaaaatgctgtctttcttccactggatggttttagctcccttgtcgaagatcaagtgaccataggtgtgtgggttcatttctgggtcttcaattctattccattggtctacttgtctgtcagtataccagtaccatgcagtttttatcacaattgctctgtagtaaagctttaggtcaggcatggcgattccaccagaggttcttttatccttgaaaagagtttttgctatcctagtttctctacacaaagaataaacaggctgagaaagaaattagggaaacaacacccttctttttttttttcttttccattttttattaggtatttagctcatttacatttccaatgctataccaaaagtcccccatacccacccacccccactcccctacccacccactccccctttttggccctggcgttcccctgtactggggcatataaagtttgcaagtccaatgggcctctctttccagtgatggccgactaggccatcttttgttacatatgcagctagagtcaagcgctccggggtactggttagttcataatgttgttccacctatagggtttcagatccctttagctccttgggtactttctctagctcctccattgggagtcctgtgatccatccattagctgactgtgagcatccacttctgtgtttgctaggccccggcatagtctcacaagagacagctacatctgggtcctttcgataaaatcttgctagtgtatgcaatggtgtcagcgtttggatgctgattatggggtggatccctggatatggcagtctctacatggtccatcctttcatctcagctccaaactttgtctctgtaactccttccatgggtgttttgttcccaattctaaggaggggcatagtgtccacacttcagtcttcatttttcttgagtttcatgtgtttaggaaattgtatcttatatcttgggtatcctaggttttgggctaatatccacttatcagtgagtacatattgtgtgagttcctttgtgaatgtgttacctcactcaggatgatgctcttcttaatagttgcaaataatataaaatatcttggcgtggctctaactaaggaagtgaaaaatctgtatgataaaaacttcaagtctctgaagaaagaaattaaagaagatctcagaagatggaaagatctcccatgctcatggattggcaggatcaacattgtaaaaatggctatcttgccaaaagcaatctacagattcaatgcaatccccatcaaaattccaactcaattcttcaacgaattagaaagagcaatctgtaaattcatctagtcttcctcttataaggagaaactaggttgttctttctttttcccttctcttttgtctctggttggtttaagtgagacacaatttcatgtagccaaggcagtcctgaatctcgatgtgtagccaaggataaccttgtccagaccttcttgcctcctcttgcccagggctgggattccaggcctgattgcccttgtcctaagcagtcgtaacctgttcatatccatgatagatgcctcacggctcgcggcttgcagcttgcggttcagggggcttgcggctcatggcttgggggtcgcagctcgcggctcgcggctcacggctcgcggctcacggccataggggctcagttcctgctgatgtcctcctgcttcctttttatttcttttttcgttttcttttttctttttttccttttctctctctctctctctctctctctttctttctttctttctttcttcctttctttcttccttcnnnnnnnnnnnnnnnnnnnnnnnnnnnnnnnnnnnnnnnnnnnnnnnnnnnnnnnnnnnnnnnnnnnnnnnnnnnnnnnnnnnnnnnnnnnnnnnnnnnnnnnnnnnnnnnnnnnnnnnnnnnnnnnnnnnnnnnnnnnnnnnnnnnnnnnaaaaaaaaaaaaaaaaaaaaaaaaaaaaaaaaaaggaaactcagagaatttatgaagaaggtaatacgtatggaacttccagtaataaaacatggactcccaaggatgctactctaacatggactcctactgcccctcccagattctcaaatcacccaagccaggaatatataatagcccgagctctctgtctttgctcccctgatctggatccactttttgaaacatttggttctcatccttctgcccacatctcttagtccttatctctcccttctcattcctcaggctccatccttcactcggcataccttgtccgtcttcccccgtatcctctccctcacccttcattccttatctctagccgacatccctctgggtggtaatgcacctgagatgttcttgttatttattgcctttgtgctgacaagccaattcagccagtgtgtacttggtcagtgtccaggtaactacaaatgccaggtgcctaaagccagaggtactacagcaggaggctctttcacttgtaattttccacaaccctgtggaagatgagttgacaacacctatgaaagcttactgcacgtctgctgtttggttccaagatttcacccttgaataaattctcaatataaatggggacttctgccccctgaaacatcacacacaaagatgctaatatctaataataatagtcaaaagcaagaaatgacctcaaatgtctaacagtagaggaatagagaaacaaaatgttgtttgtaaaaattaaatagtgctaaccaacaatgaagagaacaaccattgcttagcttagctgtattgttaaacaccatatttatgtcagggagaagatgagacagtagagtatgcaactgagtgattagtaatgtaaaattcaagaaccaggcatcaccaccttacagtggcaggcttagaagaatggtcatcctctgcatgggagctaattggaagagtgtgttaatttccagaacttgtctgtaacctaaagaaaaaagatgtgtgtgtatgtgtgtgtgtgtgtcactgtgtctgtgtcactgtgtctgtgtgtaaaagccacaggtatgcacacaacagtggaggttggaagaggacattggacccaccgtagctggagttacagttggttgtgagccatctggcatgggaactagaacctaaccacaggtcctttgcaggagcagcaacagctgtcagctgctgaggcctttctccagacctctgtttcatctttcggcgtggaaggtaactgcataaatgtgtgcctatataaagccaaacaaacaaaagccagaaaagcacactcaagagatcagagaaccttcctatatgaaatataaatgcttatttttttaaaaatgccacgtgggaatttattcctggtatcccagcactggggagtctgaagctgaggtggtaccatgagtttgaaggccccctggactacagagtgagactctgacataagaagcggaaacaaatattaaaaatagtcacatgactctaggtggaaaacgagaagcaagagtttgacagagtttggctgagagcagataagggaactgctggggccaggcactgcctggagaaactctaggggaattattttccatctttcatcctgatgggcacttctgttgctagagatgctgttaaaaactgcgctttgatttcctggcttgctgccaggttgtttcctctatgccattttaagtgctgtggtgaattcaggaccagagctacgacttctagggtcaacaatctaattacaggggcaagctaatcagagagcgaggctcacaatctaattacagacttataatctattggatatttataatgttcttagagaggcaagaggcacataaataaaattctcagagaactcagtattagtatttttttaagtgaaagtttgaaggttccctggggctcgtgagacagaaaattccataatgacgtattagttatttctttgctgctattgttctgagtcagggtctcattttggaatctacactacctggttgtctgtcctcatacacacagcttccagagtgttaggaccacagatgtactgtaccatggccagtgtgtttttttacttttttttctggtatgttgtgggactgggtgagcttttgtaccgtggagcgcatttgaaggtcagaaaggcaactttggggagttggttctcaccttccaccttgtcaagacagggtccttcagtatttctgttgcttcatctcctgctccctgcttaggtggcccaagagactcagggccattctcctgtctccaccttctgcctcacaggagtcctgggctcatttctcagacttactgggcaagtgctttgactcgctgagccatctctctggcccatgctctgttttggaattagtgaattaagacaagattttacaatggccctttattctattttacttatttgtttgtttgtttgtttgtttgtttaatgttttactctataacacaggctgtcctagaactcacagtgtcatccaggttggcttctatcacatggcagttctacctcagcccccaaagtgcaggactacaggcgtgaggcacctcacttgactagttgattttaatgagaacacctgggctgacttttttcaaattagaatgggagacaagacactgcatatttctatttttaaaataatagtttatctttttttatgtacgatggtgttttgcctgcatgtgtgaggatcccctggaataagagttatagacagttgtgagctaccatgtgggtgctgggaattgaagctgggtcctctggaagagcagctagtgcctttacccactgagccatctctccagcccaccacatatttcttgacactatcgtatttgttgaagtgagcataaaagtaacccttctaagaactaaagcaaagatatttgtcaaatgagggaagtaaacggaggagagctagaagtgtcttgtgagatccaggcttggactttaagccattgggaccaggaagacagtaggatactattcagggcatcaagtggactagaaagcagtgaccctacaactaaattctgccccgccctccagacacgcagatcctttctttgtaataaatgttaatgcttttcgacatgcgtggtggcgcacacctttaatcccagcacttgggaggcagaggcaggtggatttatgagtttgaggccagcctggtctacagagtgagttccaggacagccagggctacacagagaaaccctgtcttggaaaagaaaaaaatcaatgcttttcatgatacaagcagaggtgtggctatacatcaacttccttccagatgaatacaacagtcagaggtggattaagttctccttaatgtctcctgttggaccatgtgtatgtatctataacacgcacacacattcatggaatcattcacacaccctatctctgacctggcatagaatttggtttagctaaagtttctaatctccttccttgtgtctttagggtggagctgggagaggggtagtgttgatgttagacacataatgtgacatcagcctgctctgcatctgtgtctccagaggaacttgaacttcccagctgtactttggtaattgcttctgaaaaaaacctcctggccacacagaaatcaaataaaatttttaatcaagcaaattgaaaaatccaggctgtattataaacatcaattaaaagaagatctgggcctgggccttttgatgtttcctgaccagcttggatgctgtcacctttgtctactcagaagggagtaaaggtatgttttcaattttatgctattcgtgtgtgtgtgtgtgtgtgtgtgtgtgtgtgtgtgtttgcaggtggtgacttgttgagattgattgtcatgtagcctaagatgtcctcaaatccctttgtaactgaggatgattttaagttcctacacttgatcttagccaaaaggccaagacgaaatgatctcaagctcctaatcctcctgcttccactttccccattctgggattacaggtgcagatgaccacatcaagtttaagggttcacatccgtagtagattgtctttcgtgttctgtgactaggtagaagaactgagtgtttttgttggcagagttggcaactctaaaattatctttgaagatatagcagtgtctacctaaggaacattgggtaggcagttaactgaggtacttgtgtggaaagtccactttgcccacaccttgtttgccatccacatacattttatcttccagagcctgctctcggcagtccactgtcaccggtcgctctctgggcacttctcttcctcttgagcagctgccagcagatctttatggttctgggcatttccttctgctagtatattaataatttctgctttgctcaggagcacagtaagtgtcacagccaagagagacactgagcaacaagggttccagggcttagagagctggggtctggacctgaggatgttttggcctaggaggtaaattaaattcacggatccaaagatctcagaagaggataggagggtcatggcttcttggccaactttggctacatgttctcaaaacaaacagcaacagaatgtaatcaggcttaaaacacctgccaataagatgctgaccatttgtgggaacaatttcccacccgccttctctttctgttggggaatatcaaacacagtacaaatcatcctttagagcacttcctagtcagcattcggggtgccttctgttatacttttgaaatctagaatgtcaaatgtaacatctcgttttacttttacaagtaagcacacaactgttgtgaagatacccttgggtggcatcaggtttaaatcgtaggttcctgagaagattctgtgggaatcacctgtgtgggctattagttgcaatggtcacccaactgtttattaaaatccttttgtgcgtcaggctgcggaggaaccatgaagactcatgtatacatatgtctgacagttttctatggaatagagaaatcgataaacagcagagctaaaaaccaaacgataactttggatatgtcccacgaaggaaaaggtcatggtactgtgagagggtcatgcttgtagtgaatttccccttctctgcgaagtcttccttgatgagaattgacttggggctgagaggtaaggaagctaaatatgtgcacaggaggcagagagtattccaggcacatggctatattttgaggaaatgaatgaagactacatgtcattaagagcaagactgtagattaaaatgaactgaagggggcaggtaatgtaccccagtaggtaaaggcgctggctgctagcttggtggtcctgagcttgagccacatggtaaaagagagtgttggctctcaaaagttgtcctctgagctccacatgcgtgtcataacatgtatttgcacatggacacacatattatcacacaaacagtataatgataaataaaagcagctggaggaagtaataggattttcatgggccttttggtgacgttcatgggtaacttgctggcataagaggaattgaagcatggacagccattgtctgatgtgtttgagcaaaagatagatgatctaatcagacaataatctgagtgggaagtcagcaagcccatctgccttgagtcttcttgttctgtctgcacacattcctttctcctgacttttagcacagtatctcttgtaaaacacaggtcttaggatctactctcaggcaagacaagtcaacaaatgtcttcatggctagctctaagacagaaaggtaaggggaagatttgaatactgttttcaatggtgtggtttgcttggggaaataaggctcgggtttcttctacggcttacctgaaaatgagtggtcaggagcccaagagcttgctgtctatagagaatgaggtggacagatagtgtggctgaggggagatcagagagaaatacagaagctgtgaagttctctctctctctctctctctctctctctctctctctctcattctctctctttctccctctctcggtatgtctctgtgtgggtatgggtggtcagggatgtacccactcagaggccagaagaaggcatcaggtatcgtcctctatgttcacagcctatttctttgaggcagggtctctccttgaatctagggctcctgtcttcttagttaggctgggagccagcaagtaccagcaaacctcctgcctttgccccattcagagcaggggttaactgacacatgtgcgatgcccagcttgttaaatgcgtgctgggatcttcagcccttatgattgtgcagtaagctctcttaacccctaagccatctctctagtccccgcttttcatccttgagaggctaaggagatgaagattaatcctccaagacaacttctgagtgggtagacattgtgttgtcctccttagggtatcacttcccccactgccaaactgtgatacatcttaaggtcacaattgcttccatcacctgagttccttttgtaattgttttagtgtagtactttaaagctcagcaaattttgagggaagtcttgaataaaattagaaaacttatattcctcatttaaataacccaggaaatatatacttaatgtcttggggaaatttattccaaaacaggcaaacaggtcaactgagagaatacaacaaaagcaaaatgaatttttgtgtcttctgacacaatctgatacaaacgcaactgtaggttctaactcaaaatagcagaatcagtcaggagattaaaacagaccaaaatcggcagcttggagatgcttgtgattaatcccttgttttcagtgagttttggaccttgtttatagacattgttaggttcacttgagtctattttaagcataaataaatttgacatgcaaagtaacgggtttccttttggcatcttcatgcgtatagtttgttctcatttgctttctcgacccagtgtctgcaccctggggcccacttcttcctccagatggttgccctccttctcccaagagtccatcttctgctttcagatcatgcacatgtttctaaacacactgaatatgtgccatcctttttgtggaatttaagaagctaagagcaaagctcaacttgagttttcctctcttcctcccttgatacctcttccttccttctcatgatcccctttatactttaacatacacacacaaacacaaccttttggtttcatgccctctttatacggcatgatgaacccaggaaatcgtaccaccatacctgaagtggcttcttccttcaaagttccctcaaggggactgcagggtgactttcagtaaaactgcttgctgtctctctctctctctctctttttttaaaatttttgcttcagtcacccttatgttgttaaaaaaaaaaaccataaagagcatctctagcagccaagaaaagtcagtatcagaatccagagcagcatttgagaggcctctgtatacatcaggagcactctgagacacaaagtaacttctcaggactgtgtaattaccatcctggactgttttcctttcctttgcttatcttatagtcctgtcctatctattttagtaagtctatacaataataaaatcttgttctatcatatggaagttatgcaaagatttttctttctctacctgagaacggtggtgcagacctttaattccagctactcaggacgttatgacgagaagattgctaactcgaggaaaccgtgccgtgggcaaccgcttgagctcctatatcaatactaaaagtaaaaaatcaacagtggcagaggacttaccagcacacggagccctcagttcaacatctagtaccacaaaaatgtatctttatttcctctttagtttttcctagcaaaagattcattctctatcactaactggcctttttttttttttttacaattattatgatttttttaagtaattttgtgtacagtgtctcaggctggccttgaactacaaacttcctacttttgctttctgagtgctgggattatggatatatgctaccaggcctttcagaaaacaaattatgttgcttaattatattattattattatttaaattggcaacttgaaacaagacaagattatttgggacaggacacactagtttatcataaaaccgtttaggtttttaagttacaggaagaatgcatttaaaaacacattttatttaaatttacttaatgtatttactctttataattacttgtaggcctcccaagatatcatcatgtaacagtcaagactttatctatctatctatctatctatctatctatctatctatctatctatctatctatctatctatttatttattttaccagtataagcccttagagcttgctgttcctgaagcagaaaacactggctattccactgttaagtatgaaacagataagtatgatccggattgactgctagcctaggcaaaacagttgttatcaataaaacaattatgagcatggtatcaacttttgatggcctattcagaactgtgtcttcaagacccaggattcaagatgctgaaagaacggggcaaattgtagtttaatggtgtagaaaaacttacttcaatttcagtacacttctatatatgaatgtagcaaaaaaaaaaaaaaaaaaaaaaaaaaaaaaaaaaaagcaataatgcaaggaaggttgagttcagaaaaacatggccagaaaaaaacatgatcagaaaaatatgtaagtaaatgccagaaagcacatactaaatattaacagagcagcccgttcccagaactgcctcaggacagactgatgtaaacacaattgcctggtgtgtatcttcccaggtataatctgggaaagcaaggcagaaggccatatccggattcagagtacactgaccagattgggttctatagctatgttctcatatttaacaagaatgaacctctcttatacagtaaatgtaaatgcttgtcacaggaggcacaaaatcatgttcaaggacaatccaggggacaaaatgcacctgaggtaaaaggccatctcccttttttcctggagcttttctcacagtcccccaaggcattgtttatcatgggtcccttcgatgtttgatctgacagtaggcagggtgcggggttgggaatatgtacactacacatagtgtataggtgcccaaagaggccagaaaaaggggtacaatcacctggagttacagccattgtgagctaccagaggtgagagctgggaacaaaactcaggtcatctggaagagcaggagtcacatctaactgtcacatctaactgttgaaaggtctctctagttggcaactaaaaaaaatctttacttttctttcagcaacaaacttaaattatcatatttccaaaactatgctcacatagctaagaatggtagctttgatcccaaacaggtaaatctctaaggaacagtcagtgatacctagagagaccctgtctcaataaaaccagaaataaaaatttatatataaaatataaaatagaaataaattggaaaattgtataaacacacatatatttaaatcatgtgaattaaagggcatttgtgctaaatttacactttagtgggtgctgatttatctataagctaatttggaactatacaaacaatatgcaatcataagcacacaggcagatatgatatacgatacgtacctgtacacatacataagaatagtcaaagccccaagatttcatagcttcacttagaatcatcatttgctaattttcagaaagttaaacccgtggcgatgtgactgcttccttcagggacctaggcaatcaatctttaatcgcaaatgtattccttcaaacataggtctttttgcaaaagaaaataatagtatgtacatctaaaatatcagagcataatgtaaatatcattgagaaggctttaaaagtccaatgtggcaaaaaaaaaaaaaaaaaaaaaacaaaacccaaaatctggggcatgttctagatacttcagtgagtttcttttgcagttagatagtactgggattaaaggcgtgtactgttgcggccaaccagcagctcgaaacgaacggttcaactgagatggcagctcgggctgaaagagaggaactagacggacagaagaaagaacggagccaagtcaaaagcaactctgatcaaagctcaattttactaaatcagcacgcagttatgtaggagaggaagggggggccgattcccgccaaatagtctgggggaccagtagcagggtgaccacgtggatggctccaaacagcaaagcggcaggttccagcagtgggcgtggcagaacgattgagcaggcaagctccatccaggtgtaaacagaggaaccctaaagctgggggaggggaggctacagtgtaccaccaaggtgtctcatgcaattaatttttgaaatggtcggttaaatgtcaaaggtcctattttggtagcagtggcacagctaagtgacagaacccctatgatcctgttgctgtctgtgtgggtagcaagaagcgagtggacattgactgctgcctgactgtcctggtgctggccctgccacactcctggtggccctgggcacagaactctgttaccttgcacatcaggtgtgctgtcttctcactgcaaagctcagggtggccatgaacagatgacaacagaaaatgttattgtaatagtgggtgggaagcagcaacgttgtacagcagtcactggaagatgcttacatagtctgcccgaagttgggacacattgaaaagcaagttgagtttactgctcagagagtgtgaatgcttccagtgaatgctcctctgctgggagaagtaactgtagttaatgaagtgtttgcagagcatctgttatgtcagatgatcaagatgatgccatgaggcccttgactcattgctgaagggagcacgtgtaaaatccattggggagtttctatgctaccctcaaatatatggggtgaagtaacttgctccagcatgcttgccttcaaatagtagtggatagacaggctaaatgatctttatcattcccctctctttctccccctcctcctcttcctcccccctctctttccctcctcctctccccctccccatccctgttcctccccctccctcccttcctcccttcctcccctcctctctctctctctctctctctctctctgtgtgtatgtgtgtgtgtatgtgtgtgtgtgtgtgtgtgtgtgtgtgtgtgtaacctcctctcaatagtattgctaggaaaaaaaaacagcttctgtaatgagaattctggtttctttaaagactcagttatgctatgtgaatatgtttttgttttaatcccaggtgtggaataagaggctgtgtcacagcaggtgattatgactttcctcttgcactaccaggggcatgattcttgccagttgcagatagttaaattctgaggactctggagaaggtataaacagaagagccccaagggcctgtggtggctgctgcttcctgctgttgcttttaatagattgctggtttaccattgttgggtttctggacattgatattctgacaaggaagatctctgtcttgcccctagagaccagatgcctctaattagcaggaagcagcctaaggagatccatgcctgacctacccagtgctgtggggttgaaagggttagagtgtaataaggattgaaagagtggtagatagaagaattcaatgaaatagcaatatatacgtgtgtgtgtgtgtgtgtgtgtgtgtatgtgtgtgtgtgtgtgtgtgtgtgttgtgccaacaaacttcctaatgggtgcaggtaaacattatgcacttctcttttgatcatgccttagactcagtctttggaccagggactaggctttgttattcagaattcaaggtattatctacagtaaaaagtgcttctaagaattctgtattttgggatagcaatgttattataagtctcacataatttggggtgttttgttttgttaggttttttgcttttgtttgagaaagagccttgaatttatagaaacccatatgcccctacctcctaagttctaggattaaaggctgctcccaacacatataatattgtaacttgtctatgtctacccctgggtttatgtcaaaagacttaacaatcttcccattgaaaatgtctgggttgggctggagagatggctcaggggttaagagcactgactgctctgccagaggtcctgagttcaattcccagcaaccacatggtggctcacaaccatctgtaatgggatctgatgccctcttctggtgtgtctgaagacagtgacagtgtactcatataaataaatctttttttaaaaaaaagaaaatgtctgggagtggaataaattgtatgctatacagtgtgatatgaaggactactgccttaagctcacaatatgttgcactggctgctgctcttttatgcaaagcaagaggcttgcagaacaagaagaaacaaaatatacatcttctccattaaaaaaaaaaatcatgaaagttacaggttaagtatagctctcctgcctaatcagagtagcttctttttagtagcagatggagactattatggagatctgcaagttggtcaaaaggcaaagaataaatggtactaagatgcccatcccaatctgtgcatctacaatgcaaacctgataactacggcttagagaacatcatggaaggagcaggcagaaagattgcaagagccagaggtccaggacacttgcagcaagatctccttgacaagatcgagaagtggtatctatgaaatcttatcaatatggttgtctaatgaagacttgcataaggacagcaccaggtgacatgctagcacagatatggaatttcccagggctccacccctaggagaagaactacaggcaatagtggctgcagagagcagaagaatttatctctccagggatgatctccctgataggttttctaatctgaagtggtcagccctaaatacgtgtatatattgggtgtataatctatatctgtctatgtaacaataataaacaaggatcatgaatttgggagggagtaaggagaagtaagggagaacttggagggggcagaaggagaggtagaaataatgtaaatatagtactcatgtataaaattctttaaaaagcaaaacatctaaatttaaaaaatcatattttgataacagatttaagtgagtccttttgcgggcaaccagaacggagaatttgttcactctcttagacctcgtctgaagctttttcttgataggtctctatgattaccctctcctcccagatacaaactctctctaaccacaccaacctgtgaggaggttttccagccccaagactttaaggttaagatgcaatttttacacttttagttagccacggcatgccattctaatctacccagtccttaggtactctgtcatcagtcttgttcaccaactctgtccagcactgtccatcagtctaggggagatttcttagtagaaggcttggaacatcttcaaaaatccatctagaaacccagtggcaggccccaagaagcattctcccttgggataagtttctggtactacaggagctcctggagagactatgtttttatctggagttgggtagcagaagcccagagttaacaagcagaacatcctatgggagatgttgcatgtagcttttcactaccccacctaagctctggaattgggtcatgtcaccagccccctcccagctccccttgaatctacggataacacacacacacacacacacacacacacacacacacacaagcacacacatatacagagttgtttattttcaacaactgaacaactgttggcaattgctgggtactactacctcccacctagaaaatcatacctttaataatatctttatctctgctcctctcacctttcctaaacttcaggcccacagtcagtaagcagatgagacatgaatgacagagctcagctcagtttctttttttattttattttattttatcttatcttattattttatttaaatttttttattacatattttcctcaattacatttccaatgctatcccaaaagtcccccatcagttcagtttcttattggtttctttttattcaccctgggacccaaatcatagggcatattcagggtatcttcccttcttagttaaatcacatgtccaaaggcaaatctggtcgcattgatattgaatatctatccagaagagctttagacttgtgattttacggactagatatatagaccaaatagaaatccctgggtactaaagggatactcataagatatgtgaccctgagaagcttgaagggtacattaaagctaagcatgttgatggccaccagaagacccttctgggtttggaagatgggatagtttgaatatgcttggcccatgggaagtggcacttaagaaatgagttagtacaaactgagaggctgctgccatacaatgacagtctgaattgaaatcagtttcctttgccatactatgatgacaagcactgttccttttgttggcaagagaagtagggactgctggatgcttgtggatgggaaggccctgaacatagctagcaaataagattggagctgtgaaactgcgagagctgctcagacatcttgttcatgacagataccaactcagagtagaaatttgctaatgtaggggagaaataaaaattcagactgtgcaaggaaaaccaaaacaggagacattgctgaatgtagttccttcttaccaaagaatacatggcacaaaccacatgtccaacagtaagtagaaatctcttgctcactgcagcagtgacttaacagatagaatgatcagtcaaaacactggctgtctaaaatggacagaggcatggaaaggaccacctgggtattcttctgttccctggtaaacctgggaagagggtccagaacagaacgcttatatgacaagtgacagattttccttcctctctctatcctctttctctcttccttccttccttcccctctcttccctttcttctgctcattgtctcaatcttccttctatacctgacagtggacataggaccaagtcctgtgttctgtagggatgattccaaagcactagtccaaaactgtatttttaaacgctttgtcagaattcaggtggctgatggtgccactatctcatctgactatattagagttaagtgtgaatgcacatgtatttcctggtggtaaaaatagcttagtggtttccacatctgaataggatgtttccccatatgaacaggagtggatggaggaagtggcaccgagtagactagttttatggtctgcagtctagaccagtgcaatgatcaaactcaatgccctctcaatgtggacaaagtctgagtagaaacaaaaagagcaaagaactgtagctgagaataaaggatggactaaatgggttatgtatcagaggaaatccaacattctataaatagcttggaagaagctcagaggaaaaggatagtattatctcttaggacagttctaccaggatcccagaagggtgactctacactgtgaaccatggccttgctctaggagcccaaccaatgaatgcgagcatgcagatgtgagtgttctcgccttggagacacattctttacagtgtaattacagagtgggttcgttaatgattgagtgggattctagtactggggcaatgcctttcgagctgcatatcgttttgccataagctatcgatgtacaaaaatagtgaaagggtgggtccttttagttaatttttgattggttattgttctctctctctctctctctctctctctctctctctctctgtgtgtgtgtgtgtgtgtgtgtgtgtgtgtgtgtgtttgtgtgtgtatgtgtgtgattgggaagggacatgtgtcacagtgcatttggcgtagattctctctgtccactgtggcttctgtggatagaactcgggtcttcaggttttttccaacaaaagctttacctgtgaagccatttcattgcctgctgcttgccctgtcttctgcctgcttgtctgcttgtctgcctgcctgcctgtctgtctgtctgtctacctgtctgtctgcctgcctctctgcctatctgtctgcctctctgcctgtctgtctgcctctctgcctgtctgtctgcctctctgcctgtctgcctgcctctctgcctgtctgcctgtctgcctgcctatttacctgcctccctgcccccctccttgttgcatgcttccctcccttcatcctgtccttctcttccttgggagcttattatcaaaagagtagtttcctggtcttctccagatgtgggttgcttacaacctttggtattcgctctttttctatctgcaaaggtctttgatcatcttctggttgatttttgttctgactttcaacttgtattagtcagggttctctagagtcacagaacttatggatagtctctagatagtaaaggaatttattgatgacttacagtcggcagcccaattcccaacaattgttcagtcgcagctgtgaatggaagtccaaggatctagcagttactcagtctcacgcagcaagcaggcgaaggagcaagagcaagagctagactcccttcttccaatgtccttatattgtctccagcagaaggtgtagctcagattaaaggtgtgttccaccacacctttaatcccagatgaaaggtgtagcccagattaaaggtgtgttccttaaactcggagattcaatcttctggaatccatagccactatggctcaagatctccatatcaagatccagataaggatctccaagcctccagataagggtcactggtgagccttccaattctggattgtagttcattccaaatatagtcaagttgacaaccaggaatagccactacacaactcttaattctttcactttttagttattgtattttttatcatttaatatacagtagtggtacatgcttgcatgttgtatgtaacatgatcaaattgggatagttattttatccaccaatatttattatttctttgtggtacacgtattcagaccttctaaccactttgtagtatatgtgttactgttaccatagttaccgtactgtgctatggaacactgggacatatgtctcccatctgactataatattgtagccattgcccaacctctctattaccccctctgcttagtactctcaacctctgccagccattattctgctctgtatttcgatgatgccagcatctttagctctcctgggagaccagctctctccagtagtatttgggtctggagagctgtgggacagctctgggggcagatggaaaacagaaggatcactttaaattattttagtttaagttttctgactcaaacctctgcaaagacaatgggtcaatgtgggaagaagaaacattatcaggttctcttctatgttgggggataaagcattttctcttttgatattagtgttacaaataggggtttcatacaccactctagccaggttttaggaatttcttccagatttaagtttgtaacagcttgtttttaaggatttgtttattttatgcatatgactacaccgtagttttcttcagacacaccagaagaggccatcacatcccatttcagatggttgtgagccaccatgtggttgctgggaactgaactcaggacctctggcagagcagtcagtgctctcaaccactgagccatctctccagtccctgtaacagtgttttattgatgagaggcttttttcttctgtctttctatagttttgtgctgtcatgtgattatcttttattgtattaacacattacatgagtttatttttaagaaattgttacctttgatgttgtgaatgtgatgatgcgtgagtgtgggcacatgtatgctgtggcaagcctgtggtggtcagaggacaacttatgggagttggtttgctccatcttccatgtgggtctcagggatcacactgaggtcttctggctgggtggcaagcacccttatcgactgagcaattttgctgatccacaaattaattttcagatgttaaataatgcttgctttggggaggataaattccatttgctctggaagagtgattgttctataaacatttgctagaactcatcagtgaagccgtctgggcttggttttcgcttttggaatggagtttattttattcggttctgggttcatgtgatgtgtgctctacagctaagctatacccccagctatagagctaaaatttaggttttgtttttatacatttggctttttactgaacatgtctacaaaagaggtttagtcaaaaagaccaaagcccatatcatcatcagatccccccagattccccttattttgcttctactttcttttcctctcctaggtggcagcagcagtggtggagggggctggattgcctgctggcacagcttcagcatttgaactggacaaccagctcgtgaatcgcagattcccaatgttgatgatggccagggtcttgaccaatctttcaggccataaaagttgaacattaagctgagcagcttcagagagggcattgattctatcctccgtgactgctccctcactgttgtagagggtgaggtggagtagaggcaggcaaactcagagacctaggctgagtgctcatccccagatgtagggagagcctccctgcaatgtgaccttagctctctgcgaaggacagagcactttggctgcatccgagaaaagaaatttactgttatcaattctatctgcttattgctatttactttattttgattatttatttctttttgagacaggttcaacaatttgtgtacctctaggaatttacccacttgcttacatagaggtgatggtaatttaccctggcttgtttctgatttttataatcttttccgaatgaacttgttttgagatagtggatttgcttgaatttcctgctgttttctgttctactttaacgtcaattctgtcaaattcttccctctgcctacacaagatctggtccatgctactttctccagcttgaacatgggagcagagatggtagttttcttcttctttagtgtggctgtttaaacctacaaacctgctttcatatcatgctttacttgatccatccatagcacattcttttctaattgtaattctcttaccgaaaatgcaatattttgctcacattattgaacaatgaatgttaaatttgtccactgagaagctttatctgaaaaaagaacagttttttttttaaaaagaagctttatctgaataagattaagcatgaatctctctttttttaaaacttttcattaagtttcatgtcatgcaccccagtctcattcatctcactgtcctctctaatctaccctctgctcttgcaacctgccccccaacacacacacacacacacacacacacacacacacacacacacgcacacatgcacgcgcgcacacacacacacacacgcacacacgcacgcgcgcgcacacacacacacacacacgcacgcacacacgcacgcacgcacgcacacacgcacacacatgcatgcacacacacacacacacacacagcatagaaaacatcttgttgtagctgtagtgtgtcacagtatgtcccataccagagtatatccttctgtcttgcaaatgttcattgtaataggtcactggtttggttagaggtctctggcttctgtagcaccatcaatatttgggtcctgacctggactcctttggattatgttgttgttgccctgtgtcatggaggttttgcagtttttgattggcaggactggccctttcatgcattccagcagttcacggatgatagaggttttggggacgggcaaactcaaagccctgaacctgggtctgggtggtagctgagccagtcagccctctggctctccctcatccctcccaccaggccagctttccagcactatggcatgcatgcttctttcccccagtgtgtgggtagtgttatatgtctttgcaagttgcttaaattgtttcttttcctacggaattctgtcatatgtaccctaatatgataatatgtacttgacctataaaacttacacagctataacttattatttcattgttgaatacttgggctttctaattaagggctaacataaataatgtggttgcacatccctgtacacttgttttgaagaacagatgcacacccttgtctagtttggagactaggataacattgggaggcatggcccacgtgtactttctggtcctccagacacagccacagtgtttttcagtgtgacagaaaaacactgcatgcctgtagcaaattaccagagtttctattgtcaccccacctcccactccttgcaacaacatttgatattttcgattatttcaatttttgtttgttttgttttgttttgttttgttttgtttttttcttagacagggtttctctgtgtagccctggctgtcctggaacttactctgtagtccaggctggcctcgaattcagaaatccacctgcctctgcctcccaagtgctagggttaaaggtgtgcgccaccactgcccagccggttatttaaatttagttaatctagtggctgcaggcatatcttgttatggttttatttttcatttccacaatcactagagatacttgactccctttaaaaaatttattgataattttaatattctcttgtgtgaaatgcctgtctaaacctttttagcctatttcccttttaaccatgaatttgcagaaattcttatatactctgcaaaaaattactttgtaatttgcccaagcaaatgggtccttactttttattcttttatggtgttttggaatgaatatgttatcatcttaatacaacttagatattgataattttcttttggggtactttagtggttgttgttggtggtggtggtggtggtggtggtggtggtagtggtggtggtggtgtgtgtgtgtgtgtgtgtgttatagtctgtcttatctaatttaccaaatctttgagaagggctttttttttctttttacataatatttttattgattctttggagtttcacatcatgtaccatcacactccccagtccttccatgtctgcccaccaaccctagtgacctccccctgctaaaaaattaaaaataaaaaaacagaaaaagaaacaaaacgactccactttgtgttctatatgtactcactggagcatggtcaaacgttcagtggctgccccttaagaagagctgagttcgtccccttccacagccccagcagaagccatcaattatggagagctacactttatcatccttaccgtgcttgataagagttttctttaatcgcttcctgtttaggctgttgctttgtgggggcagtggggtaggaattgtcacagaagccttccatgtccctccttctcaactgtgtgtttgcagttatcaatatcactgcaaaagtatcttctttgctctttacagccagtgggaacacagccgtgtggtttctggtgacagcatagaccacaaacacagcttccccacttccagctgaagttaggccacagtgacaatgcagaccactcacatcaatatggcccctggtggcagcactgcctgggaacatcaacatgacttcaggctgtagcatagaccacaggtatcagcatagccacagacgggaacacagaccctggctgcagaaagactctagacacagacacagcccttagcagcatgcactcagacattaccgcggcaagcaggatatttcatagcatacttttattgtctccttaatggctgtgaggtctaatgttgtccttttcattgctgatgttggtgcaaatggtttatgattttttttctttttagtagtgcagaaatagtatatattctatagaaatctactttaaatttttatattttcctaggatagcagcccactgtatgatactcttccatggctgtacagtggccacagctcctaatcagccatataatcaccagggtgaacaactgatattctaacaggaatgtctaatctcgtgtgtgtgtgtgtgtgtgtgtgtgtgtgtgtgtgtgtgtgtatgctgtagcagatctatatatactatgccgaaacaaattaagattaactatgtatagacttttttttaaccattagccttttgctacaagttttaagctagcttttgttacaggttttatatatttttaaccatacccaatgaacttgaaaatccttagataaagagtttacataatcaataatcttgagaggtttttctgagagctgagagcaaagaaaccctagaaataaaagagttttcaagagtgagaagaagaaaaagcttatcaataaaagacttttgagagtgtggagcagaagaagctcagatatgaaggatttgggtgaagggtttgggaagtcatttgattgtacagtggcaggagttgttacagtctgcaagaatttgaaaatagagtgtgtcatgttttggccatcgagctgcagtgaagccaagccatttgcagaaagacagcgaagctttgatgaaatctctgagttagaggaggaaaagagattagagaaggagggaaagggtcaaagactgagaactccacccaagggaggattctaatcttgtagagactcataagggagctgtggaaggttacaaggctccagtgaaccaataggagagaccaaggcagggcaggcagctcctaggtgcaggtaagaaagctccaggagggagctgagaactgtggggatggagaaaaagaggggaggaagaaggaaagcgtcctggtgacaagaattacaatgtgggccatccctaaatgaattgagagacctgtcagagaaaaatgtcccaaatagtaaagatgaattgtcttaccatgtgatgggaacccgggaggcaggaggagcttcccagctcactggtgtgcttttattaagctccagggagccaacagagaggaagcaggcagtgctgggttagtatttccccatcagacaaagagagagcaggcagagggaggagcagagcctttccttgtgatgggtgcccaggatagcacagcaggctccaggagccacagatactgagatgcccagaatcacagggaagaagcagataaacaggcatactctagaacgtggcgtctactatagtgggtggcagaaatcagcagacacaatcaaaccaatagcatggcttgattaggagatgccaggcccccttggatagaaacccatttacatatcagctggtggtttcagtactagacaaataaactgagaacatgaccatctcaaggtacgattgaggggaaggggtttttgtttgtttcattggttagttggtttgttggtttgttgggtgggttttttgtcttttttgttttgtttttagtgttgatatgagggaaagtacagccagaggcacctggaagagtccagggcagagaaagaaagtggtatactgaacatggcctgtggattggaccagtccatgagaggaagggatgacagagagcaagagaagaagacaaagagagtgcaggcaagagataggagcaaaagagaggggaccaagagagagcacaagagaaatagtaagattccaagacagtgagaagctggggagggatgcccgtgagtctgagaagtttaggggatgtatctgtaggtgttggtacacttaggatagagaagcacgagagtcagaagttcaaggctgtcaccacttacgtaatgattttgagaccagaatgggccccgtgggaccctatcccggaaacaagcttgtgcactgcaatgcccatattttattttacttcctggtgctcgaatgggactgcagttgatggcacttgctttcctcactgggtgacacagctgcactccaatacagaatgtgggggtttgtgattcattcaccgcaagatctgtgcgtctgaaggtgtttttcctgtgcacctttaaccactgtatagacctggtgcctgtgcttgcttttaactcggtgcttttaactctttacactacaagaaatcagtaaaaggattcacaaggttgaggctggattcctttccatcgtatttacttaaaccaagtctctgaaaaaatgccacgtctgctgagaacagagttgggaggagtttaggacagatgtgacagtgggactctactatgggacttaccctagagctctgctctcctctgtttagaacggaaagtggcttcttcaccctgccaccccacccctaccctggaccccacccccgattcgattctttttatcttctggtttaagacatttacacactgaaagtgaaatcattccagtatacttgagctcatttttaaaggcaacatgagaagaagagataagttggggccacgttaagtctggaataaaagatacaaagaagccccccacacacctaggtttttgcatcccagatatgcaaaacatagaaaggttcattttgaaaagtctctgagtgcaactttgttgttggaattcagagagagcctgctgagacactgggtagaagctggatggtattcagatgctacctcatcgaagctgaggttttctgtaaatcactcaaacttggagagagttctgttgctaactgatgagctaactgatgagctaactgatgagcacagcttgggaaggcagccagctaagtggttggagggaaaaaaaaaaaaaactaactaaagatggcagggctctgaaagtgaacccatgtaggccagcaggtggcgtaccaggtgctggttttggtactctgagtggtggaggtcagaccaagtagtaagggatggatccagaaggcttggccaaccaggggcgagttctagctgaccctgcaggttgatggtgatcctgcaggacttgaactccctctggggctgagggatgtccacgtgtaaaagggaagccagagaaagctgaactgaagacccgggcttttaaaagaggtcggggagggggcgcaggggaggaaactaccaacggaaatagtgaatttgggtaaacattcactcttcaggcagtctaaagtcatcctcgccatcctcgccttcctggtgtgattcgcagaagtagaaagaacaccagcagctgctttgaaataccctggagctggcagatgatggacaggcaagtgagaaagggctcggctctgtatgaaagcagagcgcacatttgcatggattttaaaaggtggggagaaagggtagtcactattgggggcctctgagcccgggttgtgggagatgcttcagacattttcagctgtcttttcagaatgtgtattctttcaaacccaaccgggtgcatgctcctctggtaatgcctgtctcttcctagcaggaaacagacagctgagaccctgctgaccctgtctcctgctgaagttgccaacctcaaggaagggatcaatttttttcgaaataagactactgggaaagagtacattttatacaaggagaaggaccatctaaaggcatgcaagaacctctgcaagcaccagggaggcctgttcatgaaagacatcgaggatttagatggaaggtaccgtggctcctttgctctcttgccagtgaccctgtttgcagttagagttgacaggaaggcttctcacccgggacattttaaatgacccagtcagcaaattgcttctaagttttcctcttgtttcattggaacagtttcctgacttcaaaattatgttttgcttagatttgctttctcttctctctttctaagaactctaagttagcttgatggtcctagctattggggtgtttgggttgcaggggtaggagcacacatatgaggtattgcattcatcaaagattcaattcttctagaagtccttcttccaggacatgcaagcacattagcacacacacactcacaaacacacacacacactctctcacacatacacacacagacactcacatacattcacactcacacacacattctcacatccacatccacacactctcacatccacacactcacacatacacacacacacacacacacacacacacacacacacacacacacacacacaccagtgagagacaaacagacagagaatgctttccaaacgttgctaaaaagctggtagattttttttgtttttctgtcagcctagctacacttagaaaagagacagagtcccagctgtctcccctacacaatggtggggttctgattggttttttctaagagcctatgcctttgccagccttcatccccatagagaacgtctgtcctctggacagcagcaatgttaggacagagttgtttggctttggagaactatctggcacatctcaagagaattcttgggcatctgctgtgtcagcactatttacctcataaatgctggaccctaccctttaaaagcctgccctggtctacttgagttgaatccttaggtgttgggccttgtcattactttgtgtgatcaatcttacctgtggccttgtgtggatagctcagtaacagagagagctgaggagttctccaagaataccccactatcattatgcagaggacaatcccaaagtctagaatattctcacaactacccatagacttgtttgattacagatacagttcctcatcctagtcgactttccactgtgactctctgttacacctatagccaaaactgcagataatactcaatttgggttgttggcgtcttcctagggaatagggcagggggcctcacctccttcatctctgacacatccttgcaggactcgggggagatagaggttttgttctcctgctgattatctttgggagatattgaatttcctgtcttgccatatgtagctaaccactgagggagatgttaaagcgaagtgggctctctcctccttgcctgcctgcctgcctgccttcctactctcagctctggagtaatctggaacaagctcgtcatctttctcagcctcagtctgctcacttggaaagtgaatagattgccaggattccgagagagtaaaacatttgctgttgaagcatgggagccatgttcagatccagagcattaatgtaaaaggccaggcactgtggtgtgcgcctacaatgctaacctctggagaggcagacacagcaggatccctgggctgcctggccagccagtctagcttaatatcagtgagcttcaggttcagagagagatactgtctctcagagcaaatgaaagaaatgaagaaggagtaactgccgatgacagacatgttgggataaaggagattgtgctacttgctcttctagttctagttgtgtcatggatgttttggcttgggtagtggataactgcatatagtatattcagtactgaaagtgtcaaatttaaagggatgtttcatgttccattctgaatgtcagttctaactatatatacgtttattaagttgaacaaactttgggtctagataattttggtgtatggtgttttctatttatttgcaagctgcttttttaaaaaaatataataataaggattattgaaaataaatttcaaaaagagaaaaaagtaaatggaaaagaaattgagaaaaactcccagtagtgacttttcactcacacacatgcatatacacattctcacacacacaaagaagacccactcactcaaaacctacaaaaagcgtttgaaagaatatcaccatagtatatgataagcatccaactgatgttcactgctgttattatttatgtggggccatcaactgcctgtggtctgtacacagattatttgaagaagtgatgatttttatgttgtttgctcacctaaatatggtaagttccacaccacagattaaccattcttgtcttccgcaaagccttagtgtggttaatcttagtttttgtttgccagcagcttagctctggtgtcggggattgggggtggggtgagaggtggaggctggatgttgacagaagataactttctgaataccactccaccctccgccttatgctttcagagtctctcactgaagctggacctcactaattaggatagataggtaggaaccctccggatccttctgtctcaacatccccagtgccgattctaggtacatgctgccacttcgagcgagcgttttacaggaattccggggttcagacactgattctcatgcctgcatgacaagccactgagccatcccccagcctacaaacctcttctctttgctgccctcacagggaagctgggtactctcggctttattctctgtggagcgcaccacacagtagttaacctgcatgcctgtggaggctcccatttgcctctctacctgccgttcttttctggagcctctgtacccttgccaatcgaagagcatctttctcagggtacagttaagcatagtccattccttcctgccatccagtgtccttcctgacacataaccaggatcttagaaactgtccatctcatgtccttaagtctaatgctctcatagcttctgtgtgaggagctgaggtccttcttgtgcccaccccttccacctctctcttatctcctattcttttcccataccctcctgtctcctgcccctctctcttctcctgtcctactcctgtccctttccagtgccctccgatcaagctggcacacaaccatacttggttctttcttgggttctagaatattctatagttccatctggaatgcctcatcctgatttttagaggttgtttcccactagttcctgagaaaggaggcactacaaagtaattcttcatgaatcaaaccgtggactatgttttcttgccgccctagaaaggacgtttaaaaattctggatacaacaaagccgggatatggcagcatgatatgttttctaagttttcttccttccttccttccttccttccttccatccttccttccttccttccttccttccttccttccttccttccttcattccttccttccgttttttaaattttaaatgatgcttctggtaagagccatttcttggtttaaaaaaattccttccctcttgaaacaaaaccaacaacaaacaaatttataaagataagaacagaaatggtttgtaccctacttctgaatgagcaacctaaggtgtaccctattttcaactaaccccccctccccagatctggtaagcttcattttctggggaagtgaaagggagcctgacgtagtagctcacgcccataagcccagggcttaggaaaccgaggcagggcttctctttgtctgggaccagtttgggctacaaaataaaattctgactgaaaaacagaacagggcctggagcagtgagtcgtgaatggtggtgcatacctagaaatgaagagctgagaaacagcagggagacgaggaggccatggtcagcctcagctacatataaggtcagggctagcctgagctacatgagatccttcttcgaaaaagctgaagagagcaagaaggaatgaaaataggaaggaaggaaggaaggaaggaaggaaggaaggaaggaaggaaggaaggaagagaaggaagttagttcaagcaaatatcaaaaattatacagtacctcctttaaagtctcctgttggacatagtctgagtcttattctgaaatggagttacgttaataaacagaaatgtagaacatacacctaaatacttactgataaaaagagaattttagtgcatgttgtatataacgtgggagatgtgcatttgaaaatatactcactcttagcggggtatgatggcacatgcctttgatcccagtattcagggggcagagttctgtgagttcaaagccaacctggtctacgaagagagttcctggacagccagtgctacacagagaaatcttgtcttgaaaaaagtcagaaggaaggaaggaaggaaggaaggaaggaaggaaggaaggaagaaaagaaagaaagaaagaaagaaagaaagaaagaaagaaagaaagaaagaaagaaagaaaggaagaaaagaaggaaggaaggaaggaagaaagaaaggaaggaaggaaggaaggaaggaaggaaggaaggaagaaagaaagaaagaaagaaagaagaaagaaagaaagaaagaaagagaaagaaaatattctccatacccacttagtctgaaattcatatttatctgagtatattgcatgtgacctggtaatcatactcttaacccttaaactttgggggatcagaaacgttgaacagtagaagtgaaggctgaggagagataagtcatacataaacatgacaacattctctctgaaccctacttagctgttgtgagaacatcactcttgtgtctttgtggataagagctgtcttcaagaccagcagcttgcttatcacgtgtgtagaagcattgttttaccactagctacccttctcctcttcccctgaagctggtgtgtgaatagccccttttcaagctgactccaccctcgctcccagaccaggaggagttaccctgaagtctattctctaacacacatcattgtgtgatacaggcttgatcttcacaggaaaagactttgcttggtgattagctagcatctctttggctgccccctgtatcacttcttcataggttttctttcatgtattttgagttccatcgattgctttgacttctgagtcatgggatgccatcacacttcatcagcactaatttttttcactgtgtagtacaactgactctcatttccccccaggtccgttaaatgcacaaagcacaactggaagttagacgtgagcaccatgaaatatatcaaccctccagggagcttctgtcaagacgagctcggtaaacactcatccatgctttctgtcacagcggagaggggcagggaggggactttggaagctttatcctaatgtcttccactccgagtttcagatcagttcagattttaagctgttagacccatgcaattgattgattgtttgagacaaggtcttccttctcacgcttattgatcatttgcatttcatctttgaagaattacctgttcctctcactagttcatttatagattgggtaggttgatttctcattgttcagtctttttagttctttgcatagtctagatactacagctctgccagatgtaccgtgaacaaatatattcacctagtctctgggctgtcctcgccaaattgcttcatttgctgtgcaaatgcttgttaatgccatgagtacttaccagttgttggtgctgtttcctgacagactgcaggcctgtgcagacacttcttagctgtgtctatctgtattttgaactgtttccctactccttcccctaagtgttttcactgtttcagatcctgcattaaggtatttgatccttttgggttaattttcattaaagagttaggaatctggttttattcttgtatgtgtagttatccagttctaccagcactgtttgctggagaggttttcttttccctaatgtctgcttttggtatcttcatcaaaacctgaaatgcctctagctaagtgtgtttatatgagctcttcactctgatccaggtatctaggtgtttgtttttgtatcatcctgttctttcttacctagctttgtgaaagatttgtactacttttgttaaattaattcataagtaattttgctgggagctttgcctgagcaccgggtcctctctgaggcagccgattgggtggagcattggtggggggtgggggaggggggcaagacttggtcttgtgagtgtaaaagttgcttagtattaataatatttattccccttgattcttagttattctggggctagaaaccaatggcttcaagaagattgacacctgttgctgattattaaacaacatttacctgtcttgactctaagttactctgaggccaaaagccgatggcttcaggctggccaggcaagaaggaggcttgaagcaattaacttttattgaaccaggagaagagagttgcacttacaaaaggaaaaatttttacacaagaaaatatgcataaacacaatacattcatacacacattaatacatacacatacattatcacatactttttggggggcaatcaatttacatacttgcatatacacaactatacttatatatgatatatatcacatataactctatatgataaaatatatggtatgtatatgatacacacacacatctatatagaattgtggatggggtaaaagcaaaagcgccagtgcagcaagaactcactcattctggatgaacaaaagcttcaacctttattgcatagagagagaaaaagcttctaacccttcattgctaaatgaattttcctgtctcattataagaaaagcctgcctgctgctttctgctctctctatagctccttctctccttggtcttttctcttccctctttagccctgttacattctgctattttctgctgtctcttctgcttctattttgcttttcctctgttctccttctacatccttaaatctgctctcttcttctttgtctctccttatctgcccagcccctcacctccgtaacacttctatactcttttccttctgcttacttaattcatccttcctagttttttgtacttttccaagagaatagatcacatggtattccaagcatccttttttttcaagagttcagacaagttcaaacataaattcaaatcacatattgaacaagaagttataacaaagatgtttacatgtgtttctattaagactagttatataactaaacattcactatatgttgccagctccacaggttcattgagagtttaaaactataattcttaggtctgagttcacattgaagttttgtatagataaacccaaccaatattttatcttctatccttgcacttacaataaaatgttcattcccagtttatggccttttgttaatggttttacaatttaaagggatatatccctaagttataaatgtcatgacacctgaagactagcagagtcctaattgcagttttcatattgcagagggttttcatatcgtttgcataagtttagaaattctggagaattgttattaggaattaagaaatcatctatttctcttcatagcattgctataaaagagaacatcttcactgacttgcagaaaatctgcccaatagggagggctaatcccaaggattgttatgtcaatttaatgatgacaagaaaggcatatcaatggcaagaatcaatagacaagattccttgggtcttgcctctgagctcattcaccagagttcatggtgaaccatctcaggaaaattacctgcagcctttaccctctcctagatggctccggacagattttattctttttgatcatcttataaatttaactttaagattgcacattgctaacatgtagaaatgttaactttcatattgatcatgtatcaacaaccttcctgaattataaaattgtcgaattattttattaacctataaaaggatagaattattaattctatagtttggttaaatattttacatttttttatacttaggaccatgttctctatgaatatagatagcttaacttcttgctaatttgtgtgtcttatatttcattttcttgcgtagtagttgctttatctaagacctccaggtagaagtggcgagagaaagcctcctcgctctgtctctgctctcatagtggtggcagctgggtgttctcagccagccttgaaggcctgctttgccattctttgtttcctaacagcatcttctaattcataaaaggagactgtcttctgtcaactgtccttcacgtacccattgagatgctcatatatttctcacatttcttccatgaatgtgatgttagtccattgctcttttgaatactgaaacatcattgtgtttttcaaatgctgaaccaggctaatatgaagctcacttggtcatgtgtgattctgtttcagaccaactaggtcttgataccaaaaccatacaaacacacttcaagaaaagaaaaccagtgaccaatatttttatgaatgtaggtataaaaaatcatctacaaaatggtatcaaatacaacttatgaatgagagtgaaaagagaattaaataaaatgagaaaaatgtttgcatggataaaatatgataaactgggaactaggaaggacacaagaaccctttcacttctgagaccatcattcattcattcatccattcatcctcagtgtgaatgacattgacatctgctccctggaatgtgtgggcttttccccccagaaacaatatgtggacgttattataatctccgcactgcataggacgtgattaggctcttacgaccatctccttttgggtactaattacacctcctcattgtttctgtttacatctgctggtcaaatgtgatgctaatgtgttgataattaacatttagcacactgtgtttgataacttgtttctgatattagaattttttttcagttttttttctatctgtttcagttttctgtgggaattgcttctatagctgttcaattcccaagtcttttttttttaaaagctattttatcatttgttgtcatgatttggtggctttcttttggatcatcaatcaaccaggaaactcaggaaaccaattgcacctacagccatcgcaccattacaatccaccttcctgtcctaatgccaatcatgctgggaactgtgactttctgacatgctttcactccatgtctttcctattctttttacatagggattttagggagggttaggttggtagtgcatgcttataatggtagcacttgggagactgaggcaggagtgccatggattccaaacctgcttggataacatctgtctagccaggactacacagcaaggtcttggttcaaaatggggcaggggaaggcttcaggggactgtcatttgatcgcttttcctgaggtcagaatagggatgacagtttctctgtactttatttatagaaacagagttggcaaacatcacattcaactttactaagtgtgtggattatgcttgtgtaaggagtacaaaggcctttgtggaaatgccttccaagcaattgctgagacttacaacctccactttttctagcttctcttaagagaggaaaaataggaagaaggaaacttctttagtggttgtcagagtacaagttttctcagggtctcccctggctttcctatcagcctctcctcattggcttgcctgtgcagtaattaacacgctgaagttgattcattcctgtaaggatgcataattaccacagtaaagctcctatttttcagtacctgcttagttgattctgagggccatgttttcctggtgttctcaaccctctggctcccacgagaggatgacttcaactcctgatccccaggcttcaagctcccgagtgctaggactgcaggcatgtgccactagcctggctgagccacgaagcaaaccctgatgtggaacatatgctgttttctgagattgcaagatctgtctcaggtctcacaaggctcacagtctggaaagactataggtgtcttagagaaaaaaaaatacgtaatatatctagtgatgatcagagcttcaggggaaaatgagggctagagagggttgggaagatgttggaccactgtggctgaggagcactgtttgacctggcgtgttgactatgctctttggatggtcgatgggcacaagggtggagctggagatgagcagtgcttgatgacagctaaatgtgcatttttctagtgagtagagaatgttttgaatgtttgcaatgcaaagcggaatagaattggctcagccagcaaaatgcttgccaaatgttcagagctcatgtaatagaagctgggcatggtagtgcatccctgtgattctagcaaagtggaggaagagaccagaggatccttggagctcactggtcagtctggctagccttcttggtgagttttaggtcaaataaaagacctcatcttaatgagatgggagaacagctaaggttaacctctggcctccacaggcacacgccccatgtgcttatgtatgttcatctgcacctacacacacacacatacacacacacgtgctcagagaaacatgtatacatacacccaaaagaaataatggtaaacaagtctcttttttagcatcactgagacaaattctaaattggatttttaaaaaaatttgtttccaacaattccttttatagaagttatcacaaagtagtgtgagtactgctcattttgaaatggaggtaggggtttttgtttgtttgttttttgtttgtttgtgaaatttgtggaagggggtggcattgggcagaggcccatctcaacagactttgagacaactgttgttgggaattgtttaattacttttcttattgttgtgaccaaattcctgacaaggagcaactcaggcgaggagaggtttattttgactcatggttgggttgaacatgtagcagatatttgtcaattctaagctttcctatgccagcctacctcagcatgacgtcacacaccgtgctgaccacctgcatcctatttcatttgtgtctgccagacatctcctgattcccatctagcttgaatggcttgaaactgcttcctagttatacttcttttggctttagttgtcaggctaggagttccttcccgcacagcctctctgcaccctgactttctctctctcactggtttcatcacagtgcatgtgttaaacatgccagagatctcttgagatgcttaagtgtatcatgaacaaatgagcagcagtggctgttgccttggtagctgctgtgcgctcagtgagtattctcttctgctgtgtatagttttgaccttctgtgttttgactatgtgtttgtattttggtaccatattttcaaaaatgttgttttctcacatgctcagaattatttccctttggttctagttattgaaatggatgaaaacaatgggctttccctggtagaactgaaccctcctaacccctgggactctgatcccaggtctcctgaagaattagcttttggggaagtacaggtaaggaaacatcaacgttataatactcttaataacaaaatgaaactaagatgtcactcatacatatatttgcatatctttacaactatatatatgtgtgtgtgtatatatatacatatatatatatgcatgtatatacacatatataacctaaagattatatataacaaaatacagcatgtatatacatatatatacacatatgtatatataaaatagagatagatacataaagaagttcagaaagtatttttattgcctgaatatttgtggataagatggtatgtcagtcagtgctttgatgataaaatacttgaagctgagaaccttatgaagatttcactcatagttggagaacttcaagagcatggtgtttgtatatgcccagctctggtgagtgcttcagggtagatggactcacagtagcaggagtgtgcatgaaagtatcctgccatacatgcagaataatgactggagggaggtgccagtcctctcatgaaaactcactcttgagggaacgggcggatcctgagattctgtgaccctggaagaactattttgatttcttccaaaggctctgccagtaatgaatcaattaccttctattaggttccacctctcaaagacccaagcactctcaacatgcccacactggcaccaagtttcaagcacacgaaccttggagggggtgtggagggggttgtgagctgcattcccactgtagcagataacaagttggatatttttgcccctcatcctgagatcttcccgaatcttttatacagtttctatcttcagagcactttctgagaagaacacctcagaagtttggggaagacaaaaaagcaaaattaaatattttttttctgtatgtttagaaagttctgtgcatttgggcaggggtttattttttttcttttgaaactccactcagaacaggaatactaataactcatttgtttcctggctgttcctggctcttcacactagattcctgttgctgtatctctgctcctctgtgtattctttatctgtggatgtgacaggcaggagggtggggggtgaggaataggtctggaattcccctacctgcgcctgtctgaaaatcattgttgatgcccattctcagaagctcttggcaacctatagaatgagtaaatgggtaatgtagagcccagctagcctgacttcagtccagtctgcccagctgtgccaacccaccaaactgattaggaatcgtgtagtcaatattcctcaaagccacactagcatgctaagtcccccagtgcttgcactaacatcgctcactggtaaacacgttggagctggtttgaagaaagtaaaatctagtgcattgttgatttgacatgaagcagcaggcactagagtccaagtctgacagtctgtggagggtgtcgtgttctgtcagtgtgtgtctgtagttgtagttgagccagagctggcttgaccttgtcagagaaacagccctagccttgctctccattgctggttaccaagccataacaggaatttcactctcttctaacagataacatatctcactcatgcctgcatggacctcaagttgggagacaagcgaatggtatttgacccttggttaattggccctgcttttgcccgaggatggtggttgctacatgagcctccatctgactggttggagaggctgtgcaaagcagacctcatttatatcagccacatgcactcagaccacctgaggtaaagaagtcacatacccaactcctaagataacaatggcaacagtgggatctttgggttgttgctttgtttcttagacaggatcttatgatgttcaggctggccttgaactcactatgtagttgaggatgagaattcctgcctgctggttatactgccacttccaaatactgggattatagacatgtgccactacgctctgtttataaaacatttttgggtgcttctgcactctgacttgtaccataggactatgaaaaagaagagaaataaaagtaaaattttgtatatggaccacaattctaattttaaaagtgctcccacagtgtatatccacaagagtgaggagggagccattatggaaagcagggtgcttgtaacttctcagagacttctgctctctgttcatgaacaggcacaggcataaagcctatcagagtggccttgtttttgttcaaaatttatagcacaaaccaacacacacacacacacacacacgtaaaaggccagtgatagcagcatttgaaaagctgaggcaggaggatcaagaattcgatgccagtgtgtgctacataacaacactgtttcaaaaatgacagacaggtacttttaaaataaaggaccaacggaatattatgggttttacacacacgttgaaccccaattaccactgtcctttgaacacaggagtgccacaggtagtcacaagtgaaagtaggaactaatatcccaataaaactttagtgatggatataattcccatggatcatccattattacattcatcttataaggctgtatacagaagcagggagtgtgccaagcctagttcatgcactgtttgccaaaccccgcattttattgtttattgagatggtgcctgctatgcaaccaggcttatctgggtcttcctgccttagtctcccatgtgctagcattaccacccctcacaaccatgtcctgctttaccttctcccctttcataaatgtattcttctctcatacaacacatcctgactacagcctcccttccttccactcctcctagtccccaccacctgccacttcctctgaccctgcagaaaagagcaggcttcctagggacatcaactgaacaaggcataacaggatgaaataagattaggcacaagtcctcatatcaaatctggacaaggcaaccggtaggagaaagggctcccaaggacagccaaacgaggcagagacaactccagtcccactgttaggaatcctacaagaacacaatgctacgtgaccattatatatatatatatatattatatatatatatatatatatatataatatatatatatatatatatataatatatatatatatatatatatatgtgtgtgtgtgtgtgtgtgtgtgtatacatatatatatatatatatatatatatatatatatatatatgcagagaacctaacttcatgactgctgtttcagtctctgtgagcccctatgaaccctgcttagttgatattgtaagccatactctccctgtggcctcgaccccactagctcctacaatccttcctccctcttctgcagggttcctctagccttgcctaatgtttggctttgggtctctgcatctgctcccatcagctactagaggaagcctctctaatgatgatttgggtaggcaccaatcaatgagtatagcagaatcaatctctctctctctgcccccctctctctgccccgtctctttatcttaccttttcccagttgtttttggttccaccctgagtctctggaccatcctgtttcaggtttctaaccaatatgggactcaagttagaccagtcatttggttgacgactcccacaagctctgagccaccattgccacagcacatcttacaggaaggacaggttgtaagtctaagcttttgtggctaggtttgtatcccggtcccataaatggaagcctttcctatttacaggggatgacaggtccgggctctatatccttgctagggtcacccttataggttccagaaagtttctactgcactaggtttctatactacctcccaccaccatcccccattctagtcgccttttcctgtattctcttcttccatccctacctcacccaatccacctgtaaaatctattctatttacccttcccagggagaccatgtgtccccattgaaaggccagtcgaggaccagtgcttttcagtggcaaacacctcacttttataactcggggaagtttaacctaaagtaaaggttaaacagtgtggcagagtgactagggttcaaaggaatgttatttcataacatcagtatagtattgttatattatattagcagataataagaatgatcagttagatgatacaattagttactctctggttgtgataaaacactgtgaccaaggcaacttacaagagaaagattttatttgggcttatggttccagagcattagagttcatcatggagtggagtggaggggggatgactgtcaaggctcttgaagtcacagcggatggtgcacatattgaactaggagcatgaacagagaggatgccccgacatacttcctaagcctccccaaactgctgccaaccatggaccaagtactcgaatgcccaagactagctggctgcaatgtgcctttaatcccagcactcgggaagcagaggcaggcagatgaatctctgtaagttcaaggccagcctggtctatggagtgagttccaggacatccagaactgttacacagaggaaccctgtctcaaataagcgatcaagcaaacaaacagacaaaaaacaataacaaaaaaaacccagtaaatacctttggggggatcattttttttcctaattctctttatgatacaagttgtgttttctgaactcagagattaaaggcaggtcaaagaatcctggaatttttacatcttttgcttagaggatgacacctgcttcctccctatttcctctccctgcctcacaagttctgcttatttatgtagcttttcatagcacggatgttaaattagcacagctaatgcatgctagcatgcagcttttgtttgtgcttacagcaacatatttcatttcgtatgatagtctgattcttttacgtgtttgtctgtaggagattacagatatgcaggaccacagccagactctagtctgattctaaaactagtaagcaactctgttaaaattagaaactaccttctaatgggagcagtgctggattttgtcaaaaaaaaaaaagtcagaacactttttatttatttattatttattgtttctattatttgtgcatttatgaatatgctttctcatctatgaaaacagaaatcttcagagtatattgtaagacccaaaccacagggcatggtgccttatgtctgtaatcctaatagccaaaaggctgagttaggaggaattttaagaactccaggtcagcttggctacataaggagaccctatctaaaaaaaaaacaaacaaaacaaaacaaaacaaaaacaacacaaaaataacaacaattaaacctacaacaggaaaagtataaacaaatgagggaactcgcggcagtatacttttgtgatagaatgggtacctaaccacttgctcatctttctaccatacccttacagtgatacagcaaaaccattttaggtaattaatgctcagtagaaatggcaatggccttaatgtatataagcagccgaaaagacctgggtgcttctttacaaacagttgagattactagaatgctgaatgtttttcatcttcattaaattttattgtatgacccctctggtaacttgagtcctcctcaggataagttatgtcagtgtaactatcagcctttagaaaacatgggggtgactcacagttctataaaaaagcaggcagagccaggtggtggtggcacatgccttaaatctcagcactcaagaggcagaggcagaggcagaggcaggtggatctctgagttcaaggccaacctggtttacagagtgggttccaggtcaactagggccacacagagaaacgatatctgtgctgtgtcctctgttttattgagagcagctacttaggaagatcatgaagatgttcattctacagcaacatctgcatggctctctctgtgacttctgctattccccaccccatctagcctcaccactcaaatcaacactggtgtgaaacatgagcctaacacacttggctgatgtccactctctggtttgttagtacgacctagccatgatgtaagattctctgggatgcagtcatgtgtgtaagcaggagcaggaaggctggcttccacctctttccctttcagtcagaaagccatttctcttgctagtgaatcccagtttattatctttcaccatttccacccttctgatctagctaccctaccctgaagcagctttcccagagacgaccagacattcccatttatgttggcgacacagaaaggcctgtgttttggaacctggatcagagtggcgtcgggttaactaacatcaacgtggttccatttggaatatggcaacaggtcagagatctgtttgttttcttactatactttctgaggtgacattcaaatatacagaatgtggcccatgttgttggtacacaagatacagtgaatacaacctgtatcgaaacttcagttttggacataactgtctttgctcaaagctttcatttccacttagcaaatgtataaccttaaaataaacctagtttattataagttaataagtttattataggctaatcaacctagttccagataaagtttttcatttcctttaacttttgatctgatttgctaatttttctcaaaatgacaatcttctcaaattttaaggccaagctgacctacataattgttcaattgctggattgcaggtagacaaaagtctgcggttcatgatcttgatggacggcgttcatcctgagatggacacatgcattatcgtggagtacaaaggtaccatcctatctccggaagacagtggaaggggaagtgcgccataggtgggaaagaggatgtccgaaacctcatcctatgctcatcatctgtccccacttcagagagcacagtacatggtgctcttgtctttggaaaaggaaccttttagatttttgcaggtgaaaaacttgccaataattaggagtctatggtggcaggtacattgcttttagcacaagggaactgatatttacattgtttcaagactatcattaatttattgttgaataaacatcataagtccctttcatcatgtttgctggatatagtgatagacacctgggatcccagcagtcaggaggcagatgcaggatgaccaggagttcagaatcatgctctgacaaacagttcaggccagcctgggctctataagaccccgtcttaaagagcaaagcagataagagcaaaacaaaacaaagaaaatggaaaacaaaaaattatcactagaaaatttcatcatgggtgaagcaaggccttagttatccggtaatcatttggaacacaattgtacatagatttttgccagagataaggatgggttgagctgaccccttagtgtcagcatctggagacagtttaggaaagtagtgtgatctacagtgaaattagactgatggtcatcatgaggtactcagaacccagccagccagaaggatgacctactttacttagaaatcagaatattctaagactttagattctgacagtgtcctctttgttggattgtttctttgattgttggtgtgtgtgtgtgtgtgtgtgtgtgttgagggcacacaccaattcttctgtaatcaactggattagattacatagactgcactggacaaacttgttggcttggtcattcaaaccagagcatttgaggttacatgttatttccccacaggtcataaaatactcaacacagtggactgcaccagacccaatgggggaaggcttcctgagaaagttgctctaatgatgagtgatttcgcaggaggtgcatcaggctttccaatgactttcagtggtggaaaatttactggtaataatttatatcccagtgattctgagcattaggcatgtgcttggatggatgctttgagaataagtaaggagccaaccttgtgaactacagacacaacaaactgaggtttcagaatccgagggtagaatgcacgggactgctgaggtgaacgagcgtctctgggaatatgtaggaggagctaagaaagacagggcattctacagggcagattcccaccccaggagctcttcttctctagattcaagggtcatgctggggtgtgtgagaaaagtatacatatatatgaaacagttgattcagttttgtatctttgtgacacctctctgatcctatatgctgcaactctagatcctgtttaagtctagacttctctgaccaattgcctcccaacatgtcagtcagccctctttgctgcctgctgtgtcctcaggctagcacttctggtctactcctggcctggcttgttacactgactattttcattccccggagtcctcttgttgctaaactctccacaaccatcaattcccaatggctcgcaattcaactactgtctgttccctggctgccctgtgtacccgaccctacctcagcacagacactccctaactgctctgttgaagggtgaccatccaccccatctccttctaccctgctgtgctgttcatatcactttatatcattatttgtgcattttatttctccttttaaaacttgcttctctcactaagaaagcattttcttgggaggacttccctttttttgttcacaagatttacagtctaattcagtattgtatgcttagtgccccagagaacattgaaggtatgtaataaacactgggctgggggagaaaacaaaagagagggaaactttatgaggtgtctataatgatttcatttacagaggaagaggcagaagtcggtcctctattcaattccgtaagtggtgggcagggcttggctcctaagtgtgactaacatttgtgcctgtgaatttagtcactgaattgtcaggttataaaattatatatttcagttacatagtggaccaggcaatagtacacactagtaaatggttaataactgtctgagttacagagcatagagaatgagcttgcctataaaggaaggctatccacactgagccctgaattcagctagagtccccaaaagtataataagcatgaagcgagcttggaacctgtgtctgatctcttggtaaataatcaaaatttgctaactaaagctgaggacacatctccatcaacataatcagattagtccactctgtcttacttgtttctccatttcattttcatctgaataagtccctttcaagtagagcaagatttataaaacttttctgtttgtgatccattggcatcagagaaacttttatgcaaccctgggcatataaattcataaaattggtatgaaaatcaagtttttactgatgataaaatataagcaaattgattttaaaataattcttcaatacattatatatatatatatatatatatatatataatttagtatttattaaagacaaaggcaaatgtgtatcctacaaaatggatatacttatttatctatacaaagaattaaatcttggatgagcatttgatacagtaggatgtagggtatctcaagcagttttcaaagctgatagatattttgattttatgatcaattctgagaattccatttacataaatatgtattactatacagcagaattatgtttagggtcatttcataagcttttagaaattatgtcctgacccctagttaaaattcattgaaatttagtgaaactcaagtcaagaactcaagcagcaattttaaaaataaaagatatattaatttgatatagtctaagggaggatgataagaaaatctgaagatttttttcccataattaaaccattctgtttctgtaagagcagaaggggtcacctgtgtggtaagtctgtagtttgtagcatatagcagttttgaatgtgtgccaagggcacacataattgattgctgttgcgttgcatgacgacatgtacagtgtaaagcactcctgtgggatactcagagccagggctgcagagatagatagtgcatgatgcccagggatggtacaaggttcaactcatgtgagcgggaccattcattatgtgttttattttgaattaacttttgttagctggattctcagaaaaccgactgctgttgattttcttatgccctgtgcatttacacattccccatgtggagttacaacccagcttaagaaggtgggaaccagggcgttcactttccaatgacttgtgaacagaggatgctaaccccaaatctgtcgttgcagaggaatggaaagcccagttcattaaggctgaaagaagaaagcttctgaattacaaagctcagctggtgaaggacctgcagccccgaatctactgtccgtttgctgggtactttgtggagtctcacccatctgacaagtagggctcagcatttcattcaatatttttacatctgagtgagtgtctgtcagatggatggctttgctatatgtacaattgcacaatgagaaaaagattgtgagaatccaaaatctctctgtttctgtctctctctccccgtctcctcacctgtacacacacctttctgctatataatgacctgagtctcagatgatgagagtatacctctatggcctcaatttagtctgactacctctgtaaagatgttctttccaagcaaaagtcacaccctggggaacttgggtgtatatctgatatgtcttttctaagagggacacaactcaacctgtaccaagtacttacgttaaaaatcaaaacttttcatgacttgtcaataacttccattttatttagtttctaaaataattgatgtgcaaaagattttttatttaattttttttgcaatgatgtgtgtgtgtgtgtgtatgtgtgtacatgtgtgtaagtatgtgagcccaaatacatgtagaggccacagaacaacattaaggagtcagttctctatgtttacagcatgagtcctggggcttaaactcaggtcatcaggctcagaagcaattgcccttgtactccttgtttccaaccagcaggactgaaagcgagtgagggctgatgcacactgttagtgtgggtactgtagagtagtcagttacgtgtgtgggattcctttgacatcgatgttcatgtcacaagttgagacagagtgagccagcttacttccaggcaaacagctttagaaacccatatacttttgtttcaaaaatcaaatgaattctgaagaaatgagacaatgttgttgatgggtatatgaatattacacaaagataacttttcttgtacttgattttggtattggaaaacctttacatatagctggatcaagaagcatataaatctagttttgaactgaaagttttatgtcatctggatataaaccaagtatttctgatagaaattactgtctgaattgatataaccaaaatatacaaaatatgtgaaatctgagaaaacaggatatatgaatcaactaatacacacacacacacatatatatgtatattttatttaaaaatattaactgagtgagtggggagtaggctcacctgataaagcacttgcaatatatcattaaggacccgagtttggatttctagcactcatgcaaaaaacaggtatggcagtacatgctgtgatgccagtactagagaagtggaggcaggaggattcccgggactcagtggcccgtcagtgtagcagtgacagcatctcaaaagataagatgggaaactgttgaagaatataccaaatattaacttctggcctttacacaccctcacacatgtacgcctacatacacaggtgcatacacatgtaaatacacatagcacatgcaaaactgacagaaaagtatatgcacgtatcatgtaacactatatattttagtagagactgtagcaaactaccccagctatacagtacttggtcattcttgataatcaagctatgataggtagcagagaactttagatatctgtgatttattgttataaacatgaaaaatttgattttagtagacttgcattcacttctgttttagttacttttcattttttgttttttgttttggtttggtttttttgtttttttttcgagacaggttttctctgtgtagctctggctgtcctggaactcactctgtagaccaggctggccttgaacttagaaatccacctgcctctgcctcccaagtgttgggattaaaggcgtgtgccaccactgtccagccttagttacttttctaatgctgtgacaaaacaccatggcccaggcaatttagaaaaggaagcatttgattgagtttatagtttcagagacttggactccatggtggctgagcaaaagcttgctgcaagaaagagctgagctcacatcttgatctgcaagtaggaggcagagagcactctggaactggggcaagtcttttgaaacctcaaagccctgctcccagtaacacacctcctccaacatagccacacctcccagtccttcccaaacaggtctaccaactagggaccaagtagtcaaatatatgcgcctatgatgcctttctcatgcagaccaccatatcatcttagaacataggttcccttctctatacaccatgatttcattaatcactctacattcatcattcattacaccaaggaactgacgtacactgatggcttattgaagtctgttaacagcagtacagttgatagtcttgttagctatgagcccagcacaaagtggcctcaagccgaaagccttacactcactgctggttataagcaggcctcagcacagaggacacctgcaacgagagagagctagacctttagtttacgggttatacactaaattcgtgattgtaagcttaatggattatatctctagggattgcaacaagaccttttgtttttagtatctttaattgtattttacgtaaccaagatccagacagaatcctgctatgtagccctggcaggcctagaactctccatagacatcaagctaacctcaaacttgtgtcagtcctcctttttctacctcctcgatgctaggtttagaggaccaagccatgatgtctggcttagttgccataatttctaacaacaacaacaaaaaaacattcatatataccctatctgtagataatctcctcctttgacactgagtgagttcttatatcatttggaatttctggataaacatgaattgtattaggatctgtgctcatgtagaaatctatgtaactttaaaatacactacaagtcattttttccataggagcatccatattgacagaactaaagagccttgggccacacagaaagtaccagtccattagccttgagggatgaaaagtgggcaggaagggtggagataaaaggcaatagtaaaagtcagactctgagacccaggcagggctgggtctggtcacaatgaatggcacagtgtacgagacattggcttccccttcatgttctggttcatgactgtgagaaacatcttcagtgttctctaggtgccccaaataatgcttttactgtgacatctgtaacctcggtgcttggcaggctgaagtagaaggattgccagttccaggtcagccagggttatgaaataagagcctttctcaaatcaaacccacatgataacaactaacaaagaacaggaagagaggtcagagctcagcagctgggcgctcagccggcgtgcagccacacagtggttgggttggctagaacctgaactctgcagcacacaggagagaaatagcgactaggactcagttgtctccctggagcagagctgagctctgaaccacttttcccctcagcccagcctgagcactggtcacacttgctgttagaaagcacccaggaagatgctctagacccgtttcctcaactctaatccttgagctggaatctgggaagagccagtaattccagggaagaggcaggtgctggagtagcaaagaaagtccttggctcagagtccaaaatgcttttgatattttaacaactggtatatctaactagacaaatactaattttgtccctaaggaattgttaaagggggtggtaaagaaaagaacttgccagcattcacaactgtcacatctaacaatgtagggacacccaagaaggggatagagggcttttagtctttatccacctcaaaatagaaaaatagaagcacccccaaacactgccatggatgtaacccagtgcacagctcagaggcaggcagtgtaacatagcagggaagtggacgattcaggctttagactgcttaaagtttagaaatatgttgtaccaacaggggaacccaaggctgatatcaacctgaactctaaatgtctgtgatcaggacacaatagaagaagtagccaactatcattgttattttcttgagacaagctcttcctatgtagtttaagctagctttaagctcattatctgtctccctcaagctctccagtattaggactgcaaaactgtactaccaaacccagctttaaaagttatttcacagagtctaggtcataaacagctataaaatgcctcagacaatgtcaaatttggaaggtttcccggaaatatgtatttttttcttttctcacttcctttcttcttgtgactccttaccatatttagggggatcactgaaagcaaattttctggaaacaataattgtaggatcatggaaatgactgtatcacagctcagtagtgggattgtagacatatcctctgatagtttgtataaggaggcattaaatcatattccctgttcagcctcaaacggttaatgcaagcccactttccccataggcaaactgagctctgcacagtgaaccattgggcagtagcatacactgagcaaactgtatgacctatgacctcaggaccctgaaaagtaaacaatcgcagaaaatagaaacaaaatgacagcttgacagaataacccttcagtgatgctgaggttttaactttgtgtttacttgattatttgggaatggtatcctgtgatgaagtccaggctagcttcaaactcaagatgcttctggctcagccccaaatgctaggattatgagcacgtgccactatgccacaccctatgcttctgttttctcaaaaccatagtctctctctctctctctctctctctctctctctctctctctctctctctctctctctccctctctccctctccctctctctctctctctcctcaagacagtcaaagagtggtgttgaatgctggtgagaacaggacacattgctggggtaagggtggagcagggtagagcaggggtggggtcgaaatcgaggaagatcagaataagcaggagaaccttctgagctggaaggttttgtttcctttagttctttccttttcacttgccaagtccccaggtgactgcttcagtcacaaggctgcctccatgaaaccccaggagaggggaaagaagccttctctcaggtcagaaggactttgatttcaagagagtagagagaatcctgttgctctttctcttcttccctcaactcgctccacctaccttccctgtttgctctttgggagacagggtctgctgcagtatcccggtccagccttgaacttgcagcagttcttgccccagctttccgaagacgcagaaaggccgtgagtcttgctctgttgctgtttttctttctctaatgcttggccccaaagtaaatggaattcttagaaagaaagtactcatccagtcagggaagccaaagccctggcttctcagtagattattttctactgatggatcatttgacattgatagagagtagacacttgggaggcaagaaagtactggggaatgtttcagggagagttatggcttatgaaaatgagccagaagagcaagtaaactctggagctcggcaactggctgtactttgtgaccataagcaggagacggagactctgcaactgaagtacaagagagagcacagcttaagccccatactggtgacctgtgtgaccccatgctggtgatttggcaattgtggaacagagctaaaagaggaactgaaatgaaaaccgcagcctgaagatagcatttttgaacttgtagcataaacatgacctgcttttaatatttattaaaacgaaagtataaactgccacaaatagaaacaacacccagagtatcataaaatagttttctaaggaaaaagataagatcaaaaactaagtataaagaaaaccaggaaaacattgccatgtcacgaggggaagcacaatatatagtagatccaaaatgacacagatgctagaattattagggaaaaaaatcaaacatctataaaagttatgtttcaataagtaatggcaaaatcctttgactgtaaagacagaaagaaagctactcacacagagagaagatagaagaactaaatggaaaatttacattcaaactacacagtctacaagggcaaacacctggatgtgtttcaagggcctgctgggattgagaacagcaagaggaagtgaacttaaagatagagcaacagaagccatgaaacctataaacaggaagaaaaagactgggacaaacaagaacaggggacccgtgggacaacggcaaatgtcaggtatccatgaagaagaggtaaaggccacgcatgtaaacaagaggaagagtgggtggatggaactaaacttaataaaggtcagaaacttagatgctagaagcacagtaaggccccaaacaatataaacttgaatcaaaagaagcctggacccatcagaacaaaattaccaaaacataaagacacagcaatatcaaattaccttggttttttgtttgtttgtttgcttgcttgcttgtttttatcagaggaaacaattcaaataactgggcttctaatcagaaacagtgatggctggaagttagtggaattttaaatgtgtttacaagacaaaacaattgcatctagatccaggaaagaggtattggggcagagaggaaagcagacattctcagatgagagggctctggggatcactgccttagaaaaactcatgggatgttcttcgattaaagaggcgtggttgtgagggagaacagaaatgaaaatatcttgacatatttagtggacagctttttcattaggttttttaatttgaaagatgatgtaacaccgagacaactatcagtatggagagatgttatagattaaactgtgtctgttcaaaatttttatattaaaacactgagccctgagtagttcagaaatagagcttgcttgaaggtagggcctatacaaaaggaatctagttaaaatgatttcatgagggcagaccttgtacttaagagttggccagtgtccttaaaacaaggcacaatttgggcacagagacacatgaaggaaagatgatatgaggagacaaaggtgaggtggctcaggaatggtcatggtcagagtccgagctcagcatgcaggaggcacgggtcctgctgtacagcgaatttgaccttctagcttctgcagtgataaacaaaacagcattcctattttacttctgttctctaagcacctccagcgtggcaattagagcaaagtgattcaagattcacacatgatgtaatccaagtagattgtgagaaactagtgtagatcgtgtagaatgttataacattataatccccagagcagctagtttataagggaggtgattgaccaaaaagatttaacaggcagactaaatagaataccaaaagacttgcaagtaacttaaaagaagccaaagtgggaatcaggaaacagaggaatacagataagtgacagacataactcaagagataccgataattgtattaaatatgaatgattgagtagcccagagcagtcccttttcagcgccccactcaagcttctatgatttcatggcccacagaaagtagagatagaatagaaaaggtagcttcttttaaaaaataagaaaattaaactactagatgatagagatcgtcatggataaaggaaggcagactctgtggttacacacacacacacacacacacacacacacacacacacacacacacacatccatttcaaacataagcacagagataaatggctacaaaaagttactgctgaagaagaaaggatcggctgatgccagatgaatgtaggcttcagaacagggtgtgagaaacatagtaatgtcagttcactcaggagacagaagagtctgctgtgtgtgtgcctgacatcagatctgtaaacacactgatagaactgaagggggaaatggaaacccacagctgcagttggaggcttcgggattcttctttcaatgtttggaagaccaagaattcaaagcgtcggggaagacacagacatcccctgtgggtctgattgacattcataaggaactcagcccagggtaccagaacagacactttttcaaagtgatattaaacatccacaaagagaccgtatcctgggtcccacagcaaaccttaacagcgttgttaagtcagaagtcacactctgcatgttctgtgatcttactggaattatgctagaggtcaaaggaactgctctgtctgcaattcttagaaagcaaacagtgtcttggtgctccctgggcccaggaggaagtctcaaggagagctggtaaacattttgctgtgtgtaacaaacgaaagtgtaatttcatgatttgtgggatataagcaaggcgcagtagtacatacctatacctcagcctccagagaggccgaggcaggggaaatccttcaacccaaggtcagcctaggcagctttagtcagacagagtctgtaaaaagagaaaagtataacagagaagagagaatgtgtacaaggccctgggttcaatcgctagcagtcgaagctttttaaaatgacttgggatataatctatgctcctctgtaaaagggtctggggctgaagcctgggggtaaaacccttgcagggtagcacgcctgggctaagcaatcccctaatttcaatccccagatttaaaattttttaaagttctaaagaaacggcaagataagctcacagcaataacaaaggaaggtgtaatggacgtgaagcggctgtgtcagtaagaattaagaacaagaaagcatcctccaggtgtggtagctcatactggaaacctcagccccggggaaggggctggtcatgagttcaaactcagtctgaggtacatgagacactgttccccaaaaccaagcaaaaacaaaaatgctaataacatcataaagcttaggaaaagggtaacgaacactaaaaaccaagggagtaataagagacgagcactgccatcaggagggacaactgtccttagatgtcacaggtgatcagagactactaaagatatacaaaacaagttctgtgtgtgaaaatccaacaaccttcgtgaaatagctgattacttagaagatacagatcttcaaatctcacccaagaagaaatcctcctctatctatcagaaaaaaacgaaattcgctgtttacaaatcctacaaggaaaactctaagcccagattatttaaaggacagatgtcaattttaatattcatttccaaaaagggctgagactgtggcatcaattcacttaatgatcccagcataagagaccttattagaaaactcagaaacatagatttttaaaaaatcttcaaaattaaccaatccaataatatataaaaagagtaatataatatacctggccagctatggcttatttaaagactgcaaggtcacttcagtagattctaattgctctaaccctgagctggagaggttaactgggtggaaaaaagcacttgtgcaagcaggaggacctgagttcagacgccgaggacccacggtaaaaaaaaaaaaaaaaaaaaaaaaaaaaagtcagacgaggctacatgaagcttataaacttagtgttttagggacaagggggtgggcagaggaagagataggtgagcactggggcttgctggcttcatgtttcatcgagtgacatatgtcaaaggaataagttacagagttgacagaacagagggccttctttctctggcctctgcaggcacatcagcccacgcagtcacatacacaccacttaaacccacacaaaaccatattaacaaactaagggggaaaactcaaatgatatcagttgatgtccaaaaggtatttgacgtgactctgtattcataaagaagtaaaggaaatcaagtaaaaagggactctgggtgaagtgagaaatgcttagtgaagggccgtgaacacactgaactcacacatgctcattatatatgcatagaaataataaagacaattcatgaatggtatggtccagaaaggaaagaactgataaaatatcttttgtcaaaaaaaattttttttaaaatgttctatcaaggaaagccctaagagactacaaagattaaatgcagtttggagatgtgtgctgaaagctcacttgaaaaacagctagtgttcacaatgtgtgataaattctcgaagctcagccatcaagcaaaaacctaaaataatcattttcgccaagcatgggggcacatgcctgttatcccagcactggagaggcagaggcagcgtcctcctcctcctcctcctccccctcctcctcctcctcctcctcctcctcagctatagaagataataatttcaaaaagttaagttagaaggcacaaattagcaaaagattttattattatttagagtgtgtgtgtgtgtgtgtgtgtgtgtgtgttttatctgtgtgtaaggccattcatgccatgacctggaaatggccttcagagaaaaactttggagggttggtcatctcctttcatattgtttgagggtctcttatttctccaacactgcatactaggctacctggccctagagcattcagacaattctcttgtctctgcttcccatcttgctataggagtgctgggttataagtgtgcatcattgcatctggcatttttttttaaaaaaaaatgtatgctctaggaattaaactcatgtcaccgtgcgtgtatggtgaatacttttatgtgatgaaccatctcataagccaaagcaaatgattaattttaaaatagtcatcttggagaagctcatgtgtgtgtccaatgtattttgataatgctcacccctactctcctcacccacttttcccagaaccacccactctcatgctcaaccagttttgttttgtgggtgcttgttcgtttaacaacgccccaagttcaagctgtgctgtccatctacaaagtcctgagtgtaggaccatgcactggatagtggcagcccgattaagggccagacccttaaagaagactgattttgcctccctacaaagcaactaactgttggtacctcccactcctcctgagccccattcccattccatgctgaaacactgactggcttaggtaggtaaccacagctgctgtaagtttatgggtgccactttccagaaaatgcttttattctggtcctttcctacctctggttcttatcatttttctgtccctcttccatgatggtccctgtcttagtcactgttctattgttctgaagaggcatcatgaccaagacaacttttataaaaaataaaaaaaaaattaaaaacgcatgtaactgggggctggcttgctcacggtttcagaatttagtccattgtcattgtggcaaggagcatggcagcatgcatggcactcgaaaagcagctgagggctacatcccagtcttcaggtaagcaggcaggcagagagaatgagagacactggcataggaacatacttctccaacacgtacatcagccacatgctccacacttacgtcagtaaagtcattcttctcaaataatgccactccctggtgcctaagcatgcaaatatatgagtttatgggggccattcttagtcaagccactatattctacttcctggcccccatcaacttattgccatatcataatgcaaaatgcatttaatccatgttcaaaggccccatagacttttacggtcccaacatggtttaaaactcctaagtctcttctgcgattcataaccacctttaactgtaacccactataaaatcaaaatcaaactgcaaatcacaaacttccaacatatggtggtacagactatccatgaccatcccaaaggagaggaaagggaccatggtgaggagacagcagactaaagaatacaagacctaaaagcagctgggcttcatcctcacggcttcacacgatggcctctctggatcaccatgcgggaacacccctgatacatgcctggcctcagctgctttccctagctgcagcaggagatcccacaaccctttcttatatcctgaagctgccacgttctgctgcgaggtaggatggacctcggcccctccttcgactgtctgtacctgctttctgttgttgctctctatcacttctgaagctcccctctgattcctttagagttggaagcttacttgaatggggtcttgccctgaggtcaccactccctttattccaactagcatcagacttttctttaagctttttatcttcttgagcctaggactggatccccctcacctttccttctgattttctccttatgctgtgcattcccacagaattctctttgtcttctatagatggaaacagcctagatacccaccagctgatgaatggatagtgaactttgtggtgtagctggatcacgtggtagatctatttctagcacattgatttccacggtggctataccactataagggttccctgttgaccacatcattgccaacatctatctgtcctcttactctgagccattcttactgtggtgacaagaaatctcaatatagttgtaatttgcatttccctgacagctttttagacagtttttagaaccatctcttaatcatttgcatttcttctgagaattctctgttcagttctgtggccctctttttgattttttttttttgagttttgtctgtttgttttgttgttggtggtggtggtagtggtttttgtttgtttatttgtttgattgtttgtgggcggagagagcaggattccagggagacttttagacagcaaatgagccatggtaaggtggttagttgcaggagccacaatggcactaagagttcgcagcacagcattgctgtcagggtgaacagcatccttccgtgttgaagttaatactgcttagccaccctggaagcagtttggaagtagctttaaacttcttatatggtctagcatttccacttttggacatttgctttttaggaattcaagtctttattcacataaaactataggacaacccacatgccacaagaaaggatacacaaactgtgaaaccataagttgaagtctgtgatcctctgctctaagcttcatgagtgctgggatcacaggtctgtcgctatgcctaacttagttttatcactttaaatgctaacgacaattttaccaatatttaaatcttgcttaggttaacatacagtttatctgcttccaagcccatactgtagtaactaaatctccagatagaacatttttatgaattatgccttctgatttatagtaagagctattatgacatgccagatgaataaatcttaaagcaagtgagaaaacgcagtttcaaaaggttataaaccttatgatgtggattgtatggcaattaaaaacacaaatccataggaatgaaacacagaccagctatagttaagagatgagaggttggtaggcaataaaacctaattgaagaaagttttggggagttattctgactgagactcacacaaatctgctcgtggctatgagcccatgggactgtgtcccacagagatgaaagcagttgagtctaagtatatttaaaaacgtaaaggacaaagggcaaacttgatacgttttaagctagtatataaacattagatttcattatgacatttcatccacgtggactgctatttttggctcatgctcacccatattgtcctctgactacagttaggaaaacatgattattctttaaaaaggaaaaattaaagttatattttttttttctttagtggtggggaaggggggtcagaagacagcctgcaccagtctgttctcttttacggtgtaagtcccagggattaaactcagcttggcaccatgtttacagacataatgattctaaaaaggacttggggctaagggggacacagactgcttatcctccctcacatggcaaagttgtggctcaccttcagacaggagtcatctggtctgtgtttttatgatttcactgagtaatagagaagccagtttcagagataaattttcatggcaataatcactcaaggaaggcccttgacttcctgttgcatggcgacagctacacagaagggacagtgctgtgggatttaagctctggttctaccaccatttgtcaaacccaacacttaaggatttcatgtgtcttatgattagacacgatggactaatttgccaatacctatctttcaccatgtggtccctgaagcctcccaatgtgccttgttattgatgttttcttcttttctatatccttgtcgatattatctagatttcttgagtctcttaaatgttttttttttttagtaagagtggcccaaggttaaaatatgagttcttatggtcagtgctctttttgctttctgtgacatattgtttatggagtagcatagagctcaagtgggggtagaaaatggagggtagaggggtggggtgtgggacagaatgacacagagagtaagggacaggatggcacagatgactagaggtaaaataattgtcctcagaattctagtttgtaggaagaaaaaaataattataataccaggtagcaaatgctatggatttaagatagagacacgatgccttctggactagtgaaaactatttttaaagaccatatggtatggcagaattttccctgtccaatctatttaaatattagtgcagcaggaggcctatgattggacagaaaaacagaggcagagagtgagtcaagtagacagacaggatgattcagagacaagcgaaccagagctggcgatgccgcaagggctagctagagacagaggtggcaggaccacaacagggcagaaagttgccggcagtagcacaagaacatgctggtcattttttaaatatttcccacaacaatgtagagtctgtccagaaaaggaaaaaaggtgctgagtgtagacactgtagtttatgatgggacctagtagcatacacctggcacactacagcactcgggagcacaggcaggagaattggcaaaggttcaaggccaggtctacatggaaaattccaggcccttgtgagctatatatggagaccctatagaaaatggattttagggagagagtctacagctcagcctaagggctggggcaggggacattatgaggaaagcaggaaagaagtgagggacccagacagaactacagtgtctgcaatgataaacagtctgggggttttccagaaactttggggatcccggtgaagtctagtgaggaagacagccatcattagtcagcagtctatgagtccatattgtgggaaaggcaaaaacagaaagacattggtttggagactaatttaaagctattatagctacccaggaaataatggtgaatggtgccagaaagtgaaatagaactcgaatgaaagaaacattaagtaactggaagcacagggtcttgtagaagagctggagtgtggggtgttgtgtacaatgcaagcctttaatcccagcactcagaatgcagaggcaggccaacctctgtgagttctaggccagcctggtctacaaagtaaataccaggacagccagggctatacagggaagctctgtctcgaaaaaccaaacaaaaacaaaaacaaacaaaaaaagatctagaagagtggatatttatttaggaggtattcaaactttcagcacactgctgttggtgaaagtaagctacgattccattacgtaagcagctcgttattattgtagagaaagagacaaaaaatgtctcattaagttatggaagtttatgaactaccatttgtgctttggagagagtgatggacagacagtaccctggctcaggaggcggagcctcgcagtagggaaagccactgtgggcttgagaagggatagagctgcttgactgggaattgaagatctggggctcaggggtcgcgtgcttgccacacaagcactaggacctactttagcatctatcacccgtgtgaagcctgggcttggtcatacacacctgtaatcccagtactagggagtcagatacagatggctcattggggctggctgaccagccagcctagccaattagtgagctccagatcagaaaaaccctgtcccaaaaagttcagttgagtggtggaggaagatgcaagtgtctacctctggcttccacatgcacatgctcacaggtgcacacacacgcacacacacacacacacacacacacacacacacacagaggaactgaagcaacaagaagatgctggtgtcaggaacaaggacaaagacatgggaccttttaaggacagtgacagtgttttcaggaaagaaatacagatgtttgttcatgttctatttaactatctaactaaatatcaggtctagagaaccaacctgcaggtcaaggaagccaaattctctttagtattaatatctatccaccatcaggtgaatcacagtgacaaatctgttttttctgactcaatcattttctgtctcaacaccactgtcagtatgatgtggaaattaacaagttaggggatttttagacacaagtttggtttttgagaaaggtggtggtttggagtttgatttgggacatgcccagcgttggttactagcacatttaaattctaaatcttgagctaaggatgtaggaccatggtagagcccttacctttcatgcataagaaaagaagaaaagaaaaggaaagaaaagaagaagaaaaggaaagagaagaagaagaaaagaaaagaaaagaaaaaagagaagaagaaaagaaaagaaaaaagaaaagaagacagaagaaaagaaaagggaaggaaggaaaatggaagaaaaggaaaggaaaggaaaggaaaggaagcaggtttcaggaagggttataattgaggatacttgctcttctgtaagcagtgaaattttaaaaatgtctcgtcttgccttttgcttgccccccttctctctgtgtacacacatacacatgtatgagggtgcagcatgtacatgtatgtgaccatggatgccatggtcaaccttgagtgtcattcttcaggtgccatccacctgtgattttgagtcagtctgtcattgctgggctgggcagcaagccctaaggataacggatgctgttttaatggttttgaatgaagagacttttcagacattattctgaaagctggagagagaccctggggccttgcctgtctgtagtttgagcctatgcaggctgggtggtgtgcagtctttgcttccttctacaggaaatgaaggcagtgatagtaacagtctcatgaagcattgataagttcatatcaagcacttagtataacgactaccgactactgagtagtagccactcagtcttcattccggttgatattcagtcagactgggcaattactgcttatgtgctattcctctgcttactcatggctcctctcacttaattccagtcactacctaagtgtacttaaaaaacaaaagacatgcacttcctcaactggttagagacgatagcccagatatggtctttatttttcttaagtatgtgtgtgtgtgtggggggggggtggaataaattgggatgaaagaataaaccaaaatgttccctgttgctgccacacacactggagaatgaactgtctcatctgggaacactcctatttcttaggtacattaaggaaacaaacaccaaaaatgacccaaatcagctcaacaatcttatcaggaaaaactctgacgtggtgacatggaccccacgacctggcgctgtcctcgaccttggcaggatgctgaaggacccaacagacaggttcggcttcaatatttatgggggataaaaacaccttatgtaattttttaatattatgataaagaactctcctcctgacttgccacaggtccctactcggtactaatgttaagttttgtccagtaacatgctaagttccttacctggtaaggcctccatctcacttttaaacgtagaaatcttagaaccaggcagcctaccacacacctgtaatcccaacacttaggaggctggggcagaaggatcaggccaaagtgtactatttgagaccctgacttaagaaaaataaatatgtcttactattgaaataaaatagattaataattatcactcaagtcagacagctttctcaagcatttcatcctttataacagctcaagtgccttcatcaccccaaaaccttattagagagtaaagggtaaggggctagagaaatggctccgtagttcaaagcatccgctgctaccacagaggaccagagttcaatgccggcatccatgttgggtggctctgaaagctagttttcacctcagtgcaagtatggcctataaaattagcagcacttttcacaatatcaaacagggaaacacaatcccaaaagagctaacattgactcaagaggcctgcagctttgtaagtacacagcctgagccacacagtcataaatttctcaccacataaagaagtgcagagtttacaggacgtgaactgcgatccttctgccatttgcacctgcaatttaactttcaaatcacaattttcaatttgcaatccactgactggccgttgaaccaaggtcagtcaaaatattttcaatcaaaagtgaaattcacaattgccagtagataataaaaactaagtatatagtatatagtacatagtacatagtacatagtacatagtacatagtacatagtatatagtataaagggttttatttctggaataactttacaacctggtagaaatagttcttagctgggagtgatagttcacatctataatcccaacacttcaaaaggcaggaggattaccaaaagttcaaagccagcctggtttgtttctgggttgcagagtgagaccctgttttcccactctatccccacatgaaatagtttttacagaaattatggcaaaatattggaaatctctctctttattgctgacaagcaaatccttctaaattatgaaagttaaaattgcttaaaattctttaagaggtcccaagtgctccagtatggaagagtaaagatgtttcttgattgtttcagttaatactcatccttcaagagctgtccttcttcttcagcatcttcctaagtctcctgaattatctttgtgcaggcctctcatactgtgtcttacagcatgcggctatactgtcacccttacagacatcagagtcaccaatgaccttgataaatgcagatcctgagctcccctcagggatatgggggagacaacaggtgtgagagtcacaggagagcattctgggaaacaagaaccaatatggtggcatctcagtgctaacatacagtaaagccaccatgtactgccttgtgaaggaagaagagacaagaaatctaggactgtggtcatggaaactcaaaatagttggcatttagccagatcttagggacgagtagacaaatacaggagagacagaacaaggaagaagaggggaatagaagaagagatggggaaaggatgggagggagggcgagaatgacattttctagtcagaggccatggcctggctggggaagaaaagaacattgactaaagataaagttaggacatgaatactttgatccatagatgactcattgagaccttttggttctgggtgccagaagtacagaggacacagccaggaagaagccttggtcctcagggagccctccaggcctgaattcagagctgatgagtggaggcaggaggagacaaggataccacatggaggccagggtcagcagggcctcctagctcagggctttgaacctgtcctgtaggtaaggagagccacagaaaatgacagagcaaaggaggatcagtcttgagctgtgcttccagaaacacctcagctttgtcaggaagaatgctctagagaagcagctaaaactaggcctctgcagtcaggaggtttgggggaaagctatggcttctcacaggaagagatcccaggcaaggagctagaggagactgggtatgtatttcagaagtgacaccaaagggcctctgtaaccttggagctatgagagactcaaagtgaagctttgagacgacaggtgcctactatcgcttgcaaatatttaatagacgcgggtatgctcgcttccttagacgtttccttgtttacttcataccatgttactttctcagaacccaagagtccacactccatctcctcaggatgaacagagcttcaggactgtttgtacagctaactggattgaaggataaaaaatacacatctgtctgtgagccagagtttgattaaaaccagagcacaatatatctaaggcagaaaacactataggtgaaagtccatttgtatgctgaaatatttgttgggtaccacatggcctgacttttattgggggatgtaaacacacatttgttcaacccagaaggacatattaacagaccaaagaaccagaaccacccaagtacaacctggtgaaccagtgagttcattgggcccactttatagggacaggactggatcaaaggcagctcattacagaaaattccaaatcggatagcccccactcccagtaggaagtgtttcgattcccctccattcttttaccaaattcctctcctaatcaggatgcagaagcctctgagtgccaacatccacaaagtcggtccaagcagatcatattcaacatctccgtcacctagtaattgggagcaaaagggtcccaatataataccagtaatatcagggatcttgtgcctttcgatctccagatatatacaagactagttaacgaaatcgactcgggagccttgcctgttgcatagtgtataggaaacagtgtgccttaggctaggaaaggactctgaaaactatcccagtgtctcagtgctgttttgaccgacccgcctcatctttgtgtctttaagcaagggcattgtggagcctccagaggggacaaagatttacaaggattcctgggactttggcccgtacctggagatcttgaattctgctgtcagagatgaaatcttctgtcattcatcctggattaaagagtacttcacgtgggctggatttaagaattacaacctggtggtcagggtatgcctccgctctcttgtagtctggagatctttggaaccccctagtttctagtttgttctctaattagcacttgggaagctgtataaactgtccagcagagtgcaggcaggccatgtgataaataactcggaaatggaaggggccattaagcacagctcagtttagcttttgtagtattttctctctcctatcacaatgaattcttctttttaaatcacagtataaaacaggtgccttgtagcgttgtcatctatcctttggcttggttgggtcttccatctcctggaaccctgtcctctgtacccttctactcccggtgttccctgtccacgcgtgctttattaacctctctaccctgctcccttgtggctgccttgtacattgtctgacatgtcaggagtgcttaactgtggggctagacagtggactcacacagaggggtatcaatgaacagtgtgaggctgaagccaccaaatcctatctgcaacggtgctgaggagcaaatggcataaagcaggagcaagcatgggtgctgaacaggaattagccccagaagaacatgccaattagcatctttggcattcatgtggtgggtaagctgaggccggcagccattgagggtcagtgctagagtcgctgatgggacacctacaggggctgaagccaaaggcagctggtgactggagaagttactcagcagacttttctctaaggaaacaaagtttaatttactcagctggcactccctgtggccagcaaaaaaactatgaactcttttaatttcttggggtcagcaagaaagagaaggaaagagaaaacacacgcgcacacacaccaagtagatgaagcaaaaggcaaagtccaataactttatacacacaaatataaacaagcatgcatgcgctcgtatatacacacatacatacatgcatgcagacctacagacagacatatacacgttcacatagaatggttaaagcaaagctccagcaaagcaagcaggctccaagcatgtcacacatctacatgcatgcatatatacacacaattggtgggtggagcaagctccaacacacacccagacaagcttttcatatgtacatacatatacagagttgatgagtggaaggaacaatgtcccaacatccattcacacaaactttacacatatacatacatacatgcgtacacacatacacacacacatagttgatggatgaaagggatgatggtccagcccgcatacgttattctttcttccatagtttatataccccagctaaattttgcaagcagtataaaactacactgtgattacatttctgtttccttctagtgaatgattatgaaaaacactgtgttccccaatatctttataagaaataacattacataatacaagtaaagaaaacaaattatttctccaaacccacatacatttgtaactgagcaacttgttatagactaacaaagtataagcgccaggcgtggtggtgcacgcctttaatcccagcacttgggaggcagaggcaggtggatttctgagtacgaggtcagcctggtctacaaagtgagttccaggacagccagggctatccagagaaaccctgccttgataaaaacaaaaacaaaaacaaaaacaaaaaagcaagcaagcaagatagtttttctcagtcagtttctcttactggcaggcaacaatttgcattttcaaaaagggagagattcttttattatttatctttaaaagtaatcttgtaagaatctttaaaaatcacaactctaaacttttatataaaaatcagtcatatctaccttaaatcctcagattacatatctactcatcagaaagacttaataaatcattgcaggaagctgagggcaaaaatgaggataagaaaaccatcaccagtccagcctcagtgagagtcgtgtcagccagggctgccattgttcttgttccctgacctcgaaacgcctcttgcttaactcttaagagtgtgcttatctgaacttcaaatggtcccctaaggttttctacatcagagacagtagcaaaaacatctcaacctagctttcccaacaagtttatttttccaaatgttttctaagggtggtggtgggcatcgtcactgctgactatctatgtctctacattctttcctagggtggtaactgaatcattaatctgctctggcaacaatgcctgaaagagatcaagcattattactgtgagtgccagagatactgaggggccagaagccctctgaagttttcatataattcttagatgaaaagagacgtgagggcagcaagcagagcagaactccataacagcatgaagtcctcagggcacgtggtcctcagggtcatgccacccgaggctcactcatgtgactgtggtagccagcgggccacattccatgatttctaaagccacttgtcattccttcttgcatggccctcagcaatcacacatgtgcagagcagcaacccaggagctcaggctgtatgcttctcaaggcacgccaaaagcagagcaggctggagatgcatctctgtgtagagctcatgccttgtatgcaggaggccctggcttcagtacctaggatgccaacaatcaaacttagcagaagagggatacaagaggaagaagaggcctggggtaggcagtggttagggcaatggatcactggtgacaacttacttacacctggtgcctggggttgtacaagcagcagtcttagataacagtaggatgtgggcagcactcacaggcaccaacaggtactggctgctctcaggagaggaccaatccccagtttgctgtgcagcccctgagcatcaataccaggtcacacttgctgtattccaaagtcctggttctcgagaaacatgcttttcatgtcaggctgtcagtgttcatccctgggcaatgatgaactaaacactgtgtgagcgtgtgcgcattggtgaaagatgccagctctccccacatgccccctttgtgggatgagttatttcaagatgagatactttctatatttgaggcattcaaaccttcttttaatgacataaaagaataagagttataagaccattgttttaaataatataaaatggtggtacttagattaactctcaactatttgtaaggaaatcatctttgaaacacaaagccttgggaaactaaatgatattttcactttgggtaatcaccttgaaagtgatgtctttagactttttgatgactatatttctttaaaattttaaattacatttatgtatgttggcaggtaggtgtgtgtgtgtgtgtgtgtgtgtgtgtgtatttgtgtgtatttgtgtgtatttgtgtgtatgtgtgtttgtgctagagtgagtgtatggaggtcagagaacaactcgtgggagtcaggtccctccttccaccatgtgagttccaggcactggactcgtgtggccagccttggtggcaagcacctttacctgctgagctgtctcactggcccaatgaatgtatatctatctgtttagttgctatatgatgtgagacacatattccacattttatgttcccctatctgaaaacgtctggtgcttcttgctgtcacgtggctaataacgctctgtgctactgaagttcgagcagtgagaggaagcagttttgctgatgtggaagaatgtaacgctatcagctcaggagagagactggaatagagggagggggaaagtagtgagggagggacgaagatgacagggtatttcaattcactgctattcttttaagtgtttaagatttccatattcttagaatttcttaaagacctccaccacttgatgaatattcttccatttactgccttgcaatttgcacagatgattgaaacagatgaagatttcagcccttttcctggagggtacgactatctggtggactttctagatttatcctttccgaaagaaagacccagccgggagcatccttatgaagaagtgagtacccccccccccgtggggatcccttcctcttcctccctctccttttcttgcacactgtcctctctccttcccctcccttctcttcctgtctttattactattccttccttcctccctttccacctcacttccttctgttgactcagaaacacagctcaaaataagttaagacatgatttacccttaaaccagatatgagtgaccatgacctagggacgtgagtaaggattgctccaggttccacatgctgcattgtggagaggatttaggaagtaaagtcttaagggatttcccaaaaggaacatcaggtgggcaggtcacagcaaatcggggaatgctccattacagtcttcacaggctctctgatgatactcttagctttggggttgatggaaacttgtggtctgctaagttgatgtattccaaaggttttttttctgacaggcaagggaatgttggctcagacacagaggtggctgatgggtggctgttaaaggagctgaagacggcctaggatggttttgtctatggtttacatctctgcatcaccatgaagttctagtcagccaaccagcctttgagagttcttacaactggggtggttttcttcctgggtacttcatggactctttggtgtccaggagaacctgtgagaagacctttgctatagtcaagacatttccagagttctcctaagctaattgtcaaaagtaaaactgatccaattaaaagttctatcactccaaggtgcactgggagagcacaaaaggactaatcaacttggattctgcctctggggccttcaaaatcgtgaagaatcgtcatttcttaaacctctacaagttatagtagagatcccacaacgtgtgcttaagtcccagtgaagtcagaggcctctctgagaatcctgatctttatccctcagcaaaggcccactccagtgagtggctacttaagccttaggcaacagacataatttatcccatcacttgcacagcaatggacataaaaatgagtctaaatggtttatatacctcaaatacggagctaaggagctagccaaaatctgaaggtaaatgtcaaaccaggctacacagaaaagcaaatggatcaatcgtgtgagttttcatggcccataaccatgcaggcaatgcaaatggttcaaccaagcttccaaaagagcagttctttgaaatgtagctgtctaacacattagggacaggagcacaaaacaaaccaaggactgaaccctgagagtgccccaggaactccacataccggaaaacccaacagatagaatgttcttcacaaacaaggcctgaagctgagcacccttttcctgtgtcggctcaatatgtgttcacaggcaactgatccccacgtcagagaatgaagaaagctccctgctgggaatctacctccttccagccagtgcattagtgagccacggggttgcttcctggctggcttttccaaagccgttgtccgttgacttagattcatttaaccccagcacttaatgaggaattagaaaacaaagtcacagaaatggaggtttgtttctaagcccggccaagctggaccttatcttcacagtgttgcagttttacacagaccatgagaccaagccggtacatgcacacgttcacctaagttgtcagaaccatacagactctctttgtacaaggcaaattcctcctggacaccaggacctcaggttatccgttccctcggcaccggagaacagaggaaatcttagtagtctggcaatagcggagtctcatctccatctctaagggtgagagtctctggagagggagttagtcaatgtggacatgtttcatgtgactccagtttccggcgagtcccttggcgtgaccacgtgatgtccgggtggtgtggtggggattccctaatgactttaacctcctgatttaaggcaaccatgctttttggcaggctggacacacacacacacacacacacttgctgccatgaacacagaggcaggtggcaggtcacctgctgcttttggcaatagtatcatttattgaccacctagtgtataacctcatgtttctggtcatagaattacttgttttccctacagtcctatgaggaatatcacctttaatctccattttatagatgaagaaactgaggcagtagttataagctcgaccctggatttgagctgtggatttgcccagcttctcatctgcaccctgctttcccgccactctgtcccagtggctcttggctccctccttctgttctcagcctgtgacctgcctccaggagacttctccccttctctctttcactctgcactcctgtcagcgtggtagctactttttctaaggataggagggaatggactcccaaaccttgccagggccccctgagagctgctgtgtttccatttcagatccatagccgggtggatgtcatcaggtacgtggtgaagaacggcctgctgtgggatgatctgtatattggattccagacccgattgctgcgggaccctgatatataccatcatctgtaagcctatcctgagaatgcttgaggccacggggctgtgtgtggggaggggcatggggcacagggggttatacagggaagtgtagtcactggctgaccgtgctccccaagttagcagagatatggggctccatcttttttttttcctctgtgtttttgacaacatatcatcctgttgcccaggctaactcctgacaatctctacttcatcgtctctcataggctgggtttacatcatatctggctctcctttttaacaagaaacttgagctcagtgttctgtagactgggggtttacaggaatggcccactgtatttgtgcttgcttatactcagaaacttcacatattattaagatcatatttgggatctgagaaagatttctatctttacatgcacaaggtcagtgaaaagaatgtagtcttaccatcactactggctctctgaaaagatgaagacatttaattttgaaaagtcctattatgtaaaatgtctgggctgcagagatggttcggcaggaacgggttctgttgttaagcctgctgaccggaattcagttccagtgggacatacagtggagggaaagagatgactactgaacgttgttctctgaccactacatgcacaccaggcacacatgcatgcattctcacacacatagaaacacacacaaaataaactaattagagtagaatttttaaaaaaattagaacgtctaagtaaagccctctagcgagtgcattgaaatattcgtttacatttttttaaacttatttcttttaaaattttggtttcctttgtttggttgggttggttgagacaggccttcgttctataccccagatcagcctggaactcatttcagaacctaagctgtccccaaacctcccatgatcctccctggctcagcttccaaaatactgagataacaggtgtgagctaccacacgcagcccccaccccttagtgtcttaaaattgtattttaaaatataaagaacgtaggagtatgtgtcgtctgttatagcccttatggtttcagttgcccctcctgtgaaacctgtctgtttcctgcctctccctctgccctctctcaggatgactcttgataaagggctgtgtcttcctggcctatatctctgcatacccacacttctgtggatataacgtcttcaaaaacttgtcacctattgctgggggtgggggcagatgataccacagtgtctcagtgccacacaagtatagacaatctgcttcttaccatttgaaacagtggttggatgagtcatgtctgcatctcttggcaagtcccccatgctttcctgagttcttgtgtgtgccatttctggggctagttcagccaggccattcttcagggagcaggttcaccttcctacatctaagggggtgtggtcaccttcactaacactccaacatgatgcttttgtgcatcttgtatgagggtaactttcactaatgggaactccgtaaagtgggctcaccacaaacagacagatagctgtcctgttttaagggtctcaaaaattcagttactgaaacagcagagcaagactgtcctctggggagagctgagaccaggcaccaaagaattcctggccaagcaagaggctttgacattcaatgttcatgtctctttgctttgtttcttgcaggttttggaatcattttcagataaaactccctctaacaccacccaactggaagtcgttcctaatgcactgtgattagtctggacctggtaagtcccaggtaagcaccgtgtgggactggtagacacctagccatgtatcgtatggctttcgctctgtcacctgaattacaggaaatgtgacttccaagggatcatgaaagagagattgcatgaaaacacttaaggcataagaataaacatataaaggtatagaggtataaactagtgagctcacctgctcagagtccacaggctgcttgaaagggttgaggtgacacagtctacaaaggaaaacagatgctgttttggagagaaatcctgagtacaaaaggagagagaacaataaaaccgggaaagaaaattgctaaaagcaatggctgagacggagcctgagatcagcttttgtggcacaagtcagatttgcccttcccatagctaagcatagagtcttgttagctgtgctacaaagcttgctccaacctacatgtgatcaaaaaggccacatgctgtggaaacggtaattttcttgacccatgcatttatattcatttatcccaccagtgcccaccctctgtatttattatgtgttaatacttgcctctgcagtacagtggcaggactacagagatgacttagttgggaaagtgtttgtcatatgcgtatgggaacccaagttactcctcagcatccatacagaaaggcaggcttggtggagcatgtttgtcattccagtgctaagaagaggaagacaggcagatctctggggcttgctggccagccagcctatcctaaccagtgggttccagccaatgagatccagtctcaaaacaaggtggccatctcttaaggaagacacacctgaacggacctctgacacatgcacaagttcatgtatatacatataaagtagacagttttgtataatcgccttgatgcacagtgccacagccccactgcataattttgtacgtgatacacactcaagggagtaaagaacacatttcataactgtgagaaagtaacggacaaaatcaaccgaagaaaggaagggtttgtcttagctcacagttgggcaaacagacagtgttggggaaggcaggtcagaagcagtgactggctgccccagtcatcccaatgagaaatgaatgtttgttctttgctcacttgctctttctattcaatctaggaccccagcccagaggatggtgcctgaacattcaagatgggtctcccctgcttcgataaacctttctggaaacactttcatagacacagccataactaccattattcattggcagtgtcttttattcagagatggcaaacaatgcccccaaatcaagaatttgctcttaaatcttgaacacagcagcagtttataccaaagaagacaagtttctctcagcaatgggcaaacactacatttaagggatgttcacatatgtgcctggtgtgcattgtcgcatagacggactcagaactacttttatcggggctggtgttgtggcttggtagtatagcatgtgcttagagcatatgaggccctgggttccaacacacacacacacacacacacacacacacacacacacacacacctgtataaccctaaattcatcccatgtacactcttgtgcaaggagaaccaaggaaagccaagaatgagctctgcatgggagataaagcctaacagaaggaaaagtgagtgtcagcacagtaggaacaggaaaggaaggctaccagactccagcagcaaaaaagaagaaagctagagaagacatgtgggctgggaggaaggtggggagactagaagaaaatgggaatgagaagatgctgccggtagagagaagaatgtaaaaatggctcttgtgttctttgatagatccgtaccccaggcagctgcaggacaatgttttcagcttttcagagagctcttggcaccatctacttcccatctcactagaaccgaaatgactttgattctgttgtgaaatgtgtcaattaatgaagcccgggggtcctaagagtcttacacgcgttcgccaccggccaggaaagacgcaacaaaccggaatcttctgcggcaaaagctttattgcttacatcttcaggagcaagagagagaatggtgaaaccccgtcccttttaaggagaattatcctccgcctagaacgtgtcgctccctgattggctgcagcccattggccgagttgtcgtcatggggaaggcagagcacatggagtggagaactacccttggcacacgtgcagattatttgtttaccatttagaacacaggatgtcagcgccatcttgtaacggtgaatgtgagggcggctccccacataagagttcaatagatctttgattgatggctcatgagaattgggctgccgactgtaagtcatcaataaattcctttactatctagagactatccataagttctgtgactctagagaaccctgactaatacaactagttaataatcttagggagaaaatatttttaaaatctatagaatattgttgtgtctggccagcagatcacaacctgggttctagcctggaaaggcattttggaaacctggaagagaagaggggctaggcggtgagagaaagaaatgcagctaagacaggcattctgatcaaagctcaattttactgttctgcacgcaattataaagcaggggaagggggcccgattcccgccaattaatcttggggtccaatagcaaggtgaccacgtgcaaggctctgaacagcaaagtggcaggttccagcagtgggcatggcagaatgattgagcaggaagctccacccctgagcaagcaggtttcaggctgggggaggggagactacatctcctccctgttgttaataaaaataaaaaaaaatagaaaaggctggcctgaggcaaaaaatcaatctatgctcaatagtcctgcctgaattcttagggctaaagaaaaaaaaaaaacctgtctccgtgggatttcctatcttttcttatggtaaactgtatctggctaagactgtactttctatcctagtaaacaactaacagaaaagccctgagctgtaggctctgactttataatgctaattagtactgaataggtaacttcctagttgaattttaagtagggcattggaaccctggctaagtttgactgaacaaatttgaaatacactttattaagaataacactgagttgatattcctcagcatttttggatgacaggtgggaaacagggaggaagggtatgaccggctcggtagtacaaggccaattgtcttttttagggtgggagactgtgaagggcttgcccttctaacagtacggtctccaacctctctcccccctattaattaagtttaaaaaggccacacttaactgaggtgatcaaatgattttctcatccgtagatgagtgagcttttaaccttggcttgggtggacattgacccgattcctctcgtgggtgctgttacgacccacacctgtggctcttggtatcttttggggaggggaggcagagccgtagatatttttgttttttagctgtaaatagataccaacctccgtcaaaccgggtttatcccacaggaaactcagaaatggtcaagctggaccttcccctgcagtaattctctgcaccaagccatacccatactgtatttgtaagatcacgaaccagtgtgcacagttctgaggactgtgcagctcctaagggagaattgtcaacctcagatttagcaaggcctaggcaagaattatgtcattagtaacaccacgatttgtggctaaaataggagctggaagtcgttcctcttcatccctgttattcccatagcctgaggaactaaggacaccttgcagtaacagcaagggtgaaaagccagaggctagctaagggactaagcccgtctatcagaataaaaaccaatctctattaatattagaaatatctactttcctagccctcttggtaaacctaaattttaactcagactgaaagccacatgctggaatgtccttggaatgaagatagcatttgccacctgtgtgctcttgggggcgggggatgcatgcccactgtagttctgctgaaggtgtagattgacctgcttgaaagacaaaaatcttagagagtgaagagtaacatcacaaagcttcttttggggaagttcaggtactttattcatttgcaaattgtaaggctaaggctagtctcaggcctcctgtgggggagctggctcagagagtagcaggaaaacagctttcctgggagctttagtttccagctgaattttaagcaaaagaggaattttagtcctcaaggtgatacttataagaagattcagaatctgtgttcatctgacgaattaatctctctggcagccaccatgctctatcttcatctcgtgaaaaaacacaaactgagccccttccccagattagaaccggatccggaccctactatttgctagtcagtgggtccttccattttaccaatgcataagaattagaagtaactagatgccagtggcaatccactgctgactgacctttaatattggttgcaaaatatttagaacaaataaggtaaaggcaagatgagcctttggtgaccttgggggatgtgctctgaattaactttgctaggtaatttagaatataggaatctctaacgttggactgaatattagaccagtctaagattgagttagaatgactggtcacactgaagaaaagagaaaaatcattatgactctattaaatgactaattttaccaagtcagtatgcacagtctctgatgaactattgccataaagttaaaaggctagaagctagtctaaactggaaaaatgacaagcaaggatggatctaaaacatgaatttaatttagttttttagtcatttcaatcagaacactgagtcaacttacctgccagctcgtcacacgaattaatatgcttctgcagcgttctgtggagagaacctgttttttcctttcctaataaggtagctgttttaggatcaatctataagccaataagtagatccctttaagatactataaagcatttattaaattctttgacatttaaatttcaaatttcgaaaataaaggtatgatttaaatagtgtgtatgggaatgcactaaatagtatgtacggggatacaatttctctcttttttgtcttttaagaagttaaagttttaaaatttcacaatacctaaccttttgaattaataacttgttgacaaaacattttaaatacttggctgtaaaggggcagtgactaattgcactttcaatcatttttcttaaggagcggttgtaactagaaagcttgaaaagttattaagagtcacatgtgcataatttatttattaactagaaatatgcataagcaattgcaaatttgagaattaatagtatctgagggatgaacaattttaagcaattgtgagctcagagatatggcattgactattaatatacaaattaaggtttgattgttcagcattttaaaacaccatctacagcacacaactagattatttgtgctggaacaggggagactgtgtgtcttaagactctgccccacagcagctagttgggcccacgtgggccaacaatcggctgggaggatgagaaaaacgactttacaataatgttttttctggccaaagaattgtcttgggcacaactaatatttaattaccaatgaatataattaataacaattataaaagctttatttttttgtaaaaccttttgtagtaaactaaaaccctcagtaataaaaggatattgtctctgaatctcttgggtgagagcaaggatttaaggtaaactttctttaagaagcattagttaataaaatactttccacttaggaaaaaatatacactgaaagattaaaactcttggcttcttgtatagaagcagaaacaataaaaatttttcttacataatgtaaagttacattagccatacctagaggcagaattttctagtgattacagttcactagaagcaaaactctttgaatttaagcattattttaaacatctgaatagatctgtaacactgttaaaaagaaattttcttgaacacagggaaaaactttctcaggcactgtttgcaaaacacaagaaggccacaagccactctggggctgcccagagccctgtattgactcaaacgtaaaatactttttaatctgagcatcctggccctcctgtaataaggactgattctagaggaacaatttaactgtctatgcctctaatttttgatactctatcttaagatgacttacagttaaaacgttcttcacaactttagtgttgtgaaaaaattgcccatactgcagtttcctgccaggcagcgactatagccaaactgattgtctaatctattcacaaagacaaacataactagataactctgtcacagtttttatgaagtgagctgtattagctctctcataagatgattactcttgtaataatcttaattaacaatatatgggtgagtagaaaatcttaaatttgccaactgcaagctgcagtcaatggaacactggcagttttaaccataatttttaagttttttgtgcaaggttaggataatacctacaaccttgggaaagcaaaacccaagtttaaaacaatttatcatctttaaaatcaatattagaagcattaccatcatattacgaagtttggctgccaattaatacctatgaatagctattaaagcaagctttgatgctttaataaagaggcattgctttaaatcttatcttaaattttactatttaggataggaaccacattaattattatctaaactagaaatatctttagagacccagcctcttggcctgccttatgccacgtgtcggaaggactctaaacttgagttatcaaatttaacactaaccatctgtaggcaatgtaacaattattaatcttaaccaacaacttatgagctggaatgtgaaaatatgcagagcacattttcaataaaaaaggaaccaattggaagcagttacatttagaccaannnnnnnnnnnnnnnnnnnntatcatctttaaaatcaatattagaagcattaccatcatattacgaagtttggctgccaattaatacctatgaatagctattaaagcaagctttgatgctttaataaagaggcattgctttaaatcttatcttaaattttactatttaggataggaaccacattaattattatctaaactagaaatatctttagagacccagcctcttggcctgccttatgccacgtgtcggaaggactctaaacttgagttatcaaatttaacactaaccatctgtagcaatgtaacaattattaatcttaaccaacaacttatgagctgaatgtgaaaatatgcagagcacattttcaataaaaaaggaaccaaatgaagcagttacatttagaccaatcagagaatattaatttttgtagctacaatcatagaataaaaggaactttaccatttgtcaaacacattaatcatgaaccatttatcagcttttttactccaaaactaagaggctgtacactcgcccttttctcctaaaacgaacagtttttccagcaggggccctcctgccatgtgtttgattcctagctgaagcacgtggcagctctcggctttgcagataaagttttttataccatctttattatccaacataaaacatagaacattcattcatacagacaggacacgaacatacatgaattgaacacgagaacagattggtgcaccagacattacacgagacacaaaagggacagagtactcctgctataaggcccagagagaaatttctctctgcttttttgggacattttcctccctcatgatgcagtttttattaactgcggcaatccgcctgattattaatttccttttaataaaccctttcttttctcacgcctaatgtagcttcggagagccacggcctgttacccagctcctcttaagcttcactgctgaacctaagtgaaccagtgctcgggtttaacgctgtttcagtttagcccatactgaccttctctggtatgaatttcctttatcctttaattatttcatggagctccaaaccagcagtgcctcttccaaaaatcctttgccgtttctcagtcccgcgttggttcgccaaatgttgtgtctggccagcagatcacagcctgggttctagcctggaaaggcattttggaaacctggaagagaagagggtctaggtggcaagataaaaaaatgcagctaagacagttattctgatcaaagctcaattttactgttctgcacgcagttataaagcaggggaagggggcccaattcccgccaattagtcttggggtccaatagcagtatgaccacgtgcaaggctctgaacagcaaagcggcaggttccagcagtgggcatggcagaatgattgagcaggaagctctacccctgagcaagcaggtttcaggctgggggaggggagactacagaatataagaatctcaaaatgtcttcaaatataactacagcaaaaaggccatgaaaaagcaccccttttagaatttgaaaaacattgtttcaatgtttaaaataggcaaataagttggctgagggcttgtttgtttgtttttctgtctatttgattgtttctaatgtactgatgtatttctaaggaactgtaattgttacccagggttctcctttgcacgttgtttttccatcctgcagtcaagtgcactctctgcctctgtcacctacctcttgaatttgacttcagaatcgctgcctagctctaatcaatgaaagactatctccttctcattaaaatgagcaacaagaatagttgactattcttgtttatatcatactagaaaaaatttaaatacttggaagtcagagattagactttgtaatttatactagagagtaaattattcagttactactaaaataatataatgtttatccaaatatatgttcagatatatatgatgggcaaataaaagattgttttaaaaataaaagtttgttttctcactctgtagcccaggctgatctcaaactagtgtcaatcctcctgcttcagttgtccaactgctgaggttgcaggagtcaccacactggactaagatctgtgtcttaggataaaaagtcgcacctttctcctgaactcttagaaacgctgcattaaataaaggtcatcttggtcacctttccatttctcttcctgagatcaccagtcccctctgccctctggtgtgagacttccttctctctggcttaagcaaaagtggaatcatatttggtaggcatttttcatatcctttaatgaagtttaaaggaaatgtcccctttagtaatgagatacagaaaggattggtggggggagtagggaaggagggagggaggggaagagaggggggagggaaagagggagggagggagggagggagggaggcctaggctggccttaaattcctgtcctgccttttccccagtgctggatcacatgcctgtgctaatcatgtgccgttcgtgtgtgccttttttagtacaaagagtgacagagccacagaaaacgtacagtctttaaataaatagcgctgggtgacttggatgataagggtgggtaggactgggactcactcctaacctggatagagtcaagtatatatatatttttaacatgaacggaacctgtcacttctaggcagacaaaatgacagtatttctgggacagagtggaaaggaaatgctctgagccctgagaagatcgtgcccacctctggcagctgtgtgtgcacagcacagtaccatagtatgtcctggcttcctagaagagacgctgtgagcagtagaactccccaccaagactctggaaactcgttctgtttcattgatataactgtcattttctacccaaagcacactgtgtgcatggattcatagcaggctctgaaataagacatgttcctactcttgttattctcctttatccacactttaaggcaggcattcatctaccatccacccatccacccatccacccatccattccttccttcctctgtttatgtaatgcaagctggccttgaactccagatcctcctgccccatcctctcaagtataacgatttgtgtatagactactacaccccttttcaaagctattgcacatctctatagtaacttaagatagtttgtcctactatggcttatttttgaatatcatgggctaccgggatggctcagtgagtcaaggcttgcagccaagtctaatcctcagaaccaacatggtggaaggaaagaaacaactcctgaaaattgtcgtctgacctccacatgtgcatcttggcatgagcaagcacacatgtgctcctgtacgtgtgcacacacacacacacacacacacacacacacacacacacacaccatatcaaaaatttaaaaagaaaattgtaacagaaaagttattattagcaactgtttccctgtttgcatgaacctagattgaggatctgagagtgtggtgacagaagtgaggaggcagggacttctagagagacggccctgaggaggacacccacagacatggtgtggggagttttagtcagtttagagaaacagaaccacacgcacagggacacatataaatgagcaaaacaaacaaccctagacactaagaacccaggagtcaattcctaaggctgggtagtcacagaacagaagtctctcactgggggaatgtcctgtccagtagttcagtccacatgcagggtgcttcagtgaagaccaaaaggatctggagagctgctggtcctagcccacaaggaatactgggagagctggttctactgtcagagaaggaatcagaggcagcaacagagcacataccactctgcagcaagaggggaggtcatgtgagcaaaaggtgacctgaccttcgttctgaaaatagccccttttatttagtttccttcctaaattgtggcaagttgataccagaaccaaccacaacatagggcattcctacaagcactttgtggagtctccacagttcatatgctcagccaataaagtgaatgccatgcacacatgaagaaccgagttcagatttccagcgcccatgcaaatccctgcggttatagtgtgtatccatgatcccaactggaggggagtggggatgcagagatgggaggagccctggagctcattgtcaagacaagccagctgaaatgatgagcttcaggttcagtgaggtacaccctgtcacacaaaataaggtagagagcaattgaggaaggcacctgacattgacctctgacctctcagcacacagtcacacatccaacacacacacacacacacactcaggtcaaggaaaacctgtaactgaaagcatttacactgatgccctggctttcccaggactcacgccttccatgagctctgcttctaccagtggggtcacagccatcgctgtctagggcagtggttctcaacctgtgggccatgacccctttggaggttgaatgactgttttgcaggggtcacttatgtccatcagaaaacacaaatatttacattatgattcataacagcagcaaaactacaaagatgaagtagcaatgaaaataatttcatggtagggggaggagtcaccacaacatgaggaactgtattaaagggtcccaacatgagggaagttgagaaccactgctgtagggaaaaatacagggatttcttcttctctcccccacatcctcctcctcctcctccccctcctcctcctcctcctcctcctcctcttcctcctcctcctcctcttcctcctcctccttcttccttcccccccttctttcttctaactgcattcctggcacattagagaaatcaagccaatcttttggtttctcttgcagacaaattagtaggctagtagtcatcatttttgaagtattatactttaaaaactgacatgatttcaactggtaattatctccattaaaatgtattcctcttgtacaaataaacaccatgtaaataataagtatacaaaagtaaaataacaaatgtcgccacccatgaaaacaatgtagggttttttgttgtttactgatccaaaaaggtataaagtttatttttagaaaattatgttataagaaatataacttttaggctggtacatgccttttctcccagcactctgtgggcagaaggaggcaagtctctgtgagttccaagaacgatctaatttttatattaaaataagagaatacctaatagtgtgtacacgtggttttgtgtgtatatgcaagtttatgtgagcatgctttttctgtgtgtgtgtgtctgtgtgcgcgcatgtgatacatttagattctttccattggctagaattcctgaggctgggtaactgaactgtggcttttgctgacatcggctcagtcttccaaggcatggacaggcctgtgcgtatgaccgccctggagtctgtatttacataatttgcatatgctcctatgcctttgctgattttccatggagttccacaacactgattctgcaaagactcctccctctgctatttgcaatatagactaagttctgatcacattcttgctacgataaaatatcctgacaaaggcgacttcagagcaggaggcttgtttgtctacagtcacaagctacagttctccgtgttggaacagtgaagccaggaactggcagcagcctgtcacgtccacagtgagagtagagcgggaacaaatggatgcctgcttttgctcagcaccctcttgacatttatctgctccccgccccaaaccctgggaacagtgacacccacaataggcagatctccccacctcaattaatgggatcagaatgattgccccacagatatgcccacaggccaacctcactcttctgcacagtccctctctgagactctgtttccaggtagatctaggatgtgccaagttgacaagcagacctgaccatcacagactatttctctcttaaaataccttcagaggttgggatatagttcaacagtactacatcagtctatataagccccaggccatcccccaaaaacaccaccactgtgaatacactctctcgagtgcacacacacgtacacacgtgcacacatgcacacacgaatgtacccatgatttcctaaatgccttaagggtaatcatattttatgaaaaaaaaaaacctaacaaatactttaaaatatacagtacttataccaatcacaagacattaaattacaaaaaatataagactctgtttgacatgttattttgtttttaattaataaatgtgtttctttttagatagtatatttatttgtttgtttgtttgtttgtttatgtgtttgtgtggttgtttgtatgtgtaccacacgcatgtgcctgccgaggccagaaaatggcagcagattctacaaagctagagttacgggcagttgtgagcaactggatatgggcgctgggtatcaaacctggggtgactgcaagagcaacgagactcttaaccactgaaccatctctcaagccggatttatttactgggaggaggggccacacataccctgcagggtaagctctgtggcaggcacatctctactcagccatctctccagcaacatgtattattattttagcagtagaagaccgaagacaattgagaaaataggatagctgtccagaatgtaaagatatttactttttcctttggacacgctgaactactctaatttgagctggacaacacaccaaggcctgggaaactgcaatgagccaaagttgtcagtaggtgacagaagagcactgcacagcaccaattgagctctttgaggctgttgagctgtttgaggttattgagctatttggttgagagacttacagagaagctattctcttcaggagcacctaaggggaggaaggcttccttccagcacattccgttccaggaatcacccgtttttatggggaaccacctaaggcattcaggttacatcttgtaaaagaagagctcttgtgagggcatacgacatcttcattccttctgcctttcagattgaggataatcagatcgtatatttcttttctaaaacaagatgttggtgtgtaacccgggatgctctcagactctcagctctcttcctccctccattccacagttctgagcttataagaattacagacttacctct

SEQ ID NO: 1597 - DNA, 667 bp, Mus musculus
agagaccaaggcagggcaggcagctcctaggtgcaggcagtctaaagtcatcctcgccatcctcgccttcctggtgtgattcgcagaagtagaaagaacaccagcagctgctttgaaataccctggagctggcagatgatggacaggaaacagacagctgagaccctgctgaccctgtctcctgctgaagttgccaacctcaaggaagggatcaatttttttcgaaataagactactgggaaagagtacattttatacaaggagaaggaccatctaaaggcatgcaagaacctctgcaagcaccagggaggcctgttcatgaaagacatcgaggatttagatggaaggtccgttaaatgcacaaagcacaactggaagttagacgtgagcaccatgaaatatatcaaccctccagggagcttctgtcaagacgagctcgttattgaaatggatgaaaacaatgggctttccctggtagaactgaaccctcctaacccctgggactctgatcccaggtctcctgaagaattagcttttggggaacttcttttggggaagttcaggtactttattcatttgcaaattgtaaggctaaggctagtctcaggcctcctgtgggggagctggctcagagagtagcaggaaaacagctttcctgggagcttta

SEQ ID NO: 1598 - protein, 167 aa, Mus musculus
MMDRKQTAETLLTLSPAEVANLKEGINFFRNKTTGKEYILYKEKDHLKACKNLCKHQGGLFMKDIEDLDGRSVKCTKHNWKLDVSTMKYINPPGSFCQDELVIEMDENNGLSLVELNPPNPWDSDPRSPEELAFGELLLGKFRYFIHLQIVRLRLVSGLLWGSWLRE

SEQ ID NO: 1599 - DNA, 4152 bp, Mus musculus
ggaccctccattctggcagtggcagctgtgaagtctagcgatcttcttctggagagaacagatcagcaggcaataatggagtgttcccggtcaactctcatggcctcaggactctcacagccagcagtttccagatatggggattgatccccttcagtgcctcttgggacatggaatattggcagactctctctggatctgctcctggattgagctctacaaatacaggagggtggagctgggagaggggtagtgttgatgttagacacataatgtgacatcagcctgctctgcatctgtgtctccagaggaacttgaacttcccagctgtactttggtaattgcttctgaaaaaaacctcctggccacacagaaatcaaataaaatttttaatcaagcaaattgaaaaatccaggctgtattataaacatcaattaaaagaagatctgggcctgggccttttgatgtttcctgaccagcttggatgctgtcacctttgtctactcagaagggagtaaaggcagtctaaagtcatcctcgccatcctcgccttcctggtgtgattcgcagaagtagaaagaacaccagcagctgctttgaaataccctggagctggcagatgatggacaggaaacagacagctgagaccctgctgaccctgtctcctgctgaagttgccaacctcaaggaagggatcaatttttttcgaaataagactactgggaaagagtacattttatacaaggagaaggaccatctaaaggcatgcaagaacctctgcaagcaccagggaggcctgttcatgaaagacatcgaggatttagatggaaggtccgttaaatgcacaaagcacaactggaagttagacgtgagcaccatgaaatatatcaaccctccagggagcttctgtcaagacgagctcgttattgaaatggatgaaaacaatgggctttccctggtagaactgaaccctcctaacccctgggactctgatcccaggtctcctgaagaattagcttttggggaagtacagataacatatctcactcatgcctgcatggacctcaagttgggagacaagcgaatggtatttgacccttggttaattggccctgcttttgcccgaggatggtggttgctacatgagcctccatctgactggttggagaggctgtgcaaagcagacctcatttatatcagccacatgcactcagaccacctgagctaccctaccctgaagcagctttcccagagacgaccagacattcccatttatgttggcgacacagaaaggcctgtgttttggaacctggatcagagtggcgtcgggttaactaacatcaacgtggttccatttggaatatggcaacaggtagacaaaagtctgcggttcatgatcttgatggacggcgttcatcctgagatggacacatgcattatcgtggagtacaaaggtcataaaatactcaacacagtggactgcaccagacccaatgggggaaggcttcctgagaaagttgctctaatgatgagtgatttcgcaggaggtgcatcaggctttccaatgactttcagtggtggaaaatttactgaggaatggaaagcccagttcattaaggctgaaagaagaaagcttctgaattacaaagctcagctggtgaaggacctgcagccccgaatctactgtccgtttgctgggtactttgtggagtctcacccatctgacaagtacattaaggaaacaaacaccaaaaatgacccaaatcagctcaacaatcttatcaggaaaaactctgacgtggtgacatggaccccacgacctggcgctgtcctcgaccttggcaggatgctgaaggacccaacagacagcaagggcattgtggagcctccagaggggacaaagatttacaaggattcctgggactttggcccgtacctggagatcttgaattctgctgtcagagatgaaatcttctgtcattcatcctggattaaagagtacttcacgtgggctggatttaagaattacaacctggtggtcaggatgattgaaacagatgaagatttcagcccttttcctggagggtacgactatctggtggactttctagatttatcctttccgaaagaaagacccagccgggagcatccttatgaagaaatccatagccgggtggatgtcatcaggtacgtggtgaagaacggcctgctgtgggatgatctgtatattggattccagacccgattgctgcgggaccctgatatataccatcatctgttttggaatcattttcagataaaactccctctaacaccacccaactggaagtcgttcctaatgcactgtgattagtctggacctggtaagtcccagaccccagcccagaggatggtgcctgaacattcaagatgggtctcccctgcttcgataaacctttctggaaacactttcatagacacagccataactaccattattcattggcagtgtcttttattcagagatggcaaacaatgcccccaaatcaagaatttgctcttaaatcttgaacacagcagcagtttataccaaagaagacaagtttctctcagcaatgggcaaacactacatttaagggatgttcacatatgtgcctggtgtgcattgtcgcatagacggactcagaactacttttatcggggctggtgttgtggcttggtagtatagcatgtgcttagagcatatgaggccctgggttccaacacacacacacacacacacacacacacacacacacacacacacctgtataaccctaaattcatcccatgtacactcttgtgcaaggagaaccaaggaaagccaagaatgagctctgcatgggagataaagcctaacagaaggaaaagtgagtgtcagcacagtaggaacaggaaaggaaggctaccagactccagcagcaaaaaagaagaaagctagagaagacatgtgggctgggaggaaggtggggagactagaagaaaatgggaatgagaagatgctgccggtagagagaagaatgtaaaaatggctcttgtgttctttgatagatccgtaccccaggcagctgcaggacaatgttttcagcttttcagagagctcttggcaccatctacttcccatctcactagaaccgaaatgactttgattctgttgtgaaatgtgtcaattaatgaagcccgggggtcctaagagtcttacacgcgttcgccaccggccaggaaagacgcaacaaaccggaatcttctgcggcaaaagctttattgcttacatcttcaggagcaagagagagaatggtgaaaccccgtcccttttaaggagaattatcctccgcctagaacgtgtcgctccctgattggctgcagcccattggccgagttgtcgtcatggggaaggcagagcacatggagtggagaactacccttggcacacgtgcagattatttgtttaccatttagaacacaggatgtcagcgccatcttgtaacggtgaatgtgagggcggctccccacataagagttcaatagatctttgattgatggctcatgagaattgggctgccgactgtaagtcatcaataaattcctttactatctagagactatccataagttctgtgactctagagaaccctgactaatacaactagttaataatcttagggagaaaatatttttaaaatctatagaatattgttgtgtctggccagcagatcacaacctgggttctagcctggaaaggcattttggaaacctggaagagaagaggggctaggcggtgagagaaagaaatgcagctaagacaggcattctgatcaaagctcaattttactgttctgcacgcaattataaagcaggggaagggggcccgattcccgccaattaatcttggggtccaatagcaaggtgaccacgtgcaaggctctgaacagcaaagtggcaggttccagcagtgggcatggcagaatgattgagcaggaagctccacccctgagcaagcaggtttcaggctgggggaggggagactacatctcctccctgttgttaataaaaataaaaaaaaatagaaaaggctggcctgaggcaaaaaatcaatctatgctcaatagtcctgcctgaattcttagggctaaa

SEQ ID NO: 1600 - protein, 571 aa, Mus musculus
MMDRKQTAETLLTLSPAEVANLKEGINFFRNKTTGKEYILYKEKDHLKACKNLCKHQGGLFMKDIEDLDGRSVKCTKHNWKLDVSTMKYINPPGSFCQDELVIEMDENNGLSLVELNPPNPWDSDPRSPEELAFGEVQITYLTHACMDLKLGDKRMVFDPWLIGPAFRWWLLHEPPSDWLERLCKADLIYISHMHSDHLSYPTLKQLSQRRPDIPIYVGDTERPVFWNLDQSGVGLTNINVVPFGIWQQVDKSLRFMILMDGVHPEMDTCIIVEYKGHKILNTVDCWNGGRLPEKVMMSDFAGGASGFPMTFSGGKFTEEWKAQFIKAERRKLLNYKAQLVKDLQPRIYCPFAGYFVESHPSDKYIKETNTKNDPNQLNNLIRKNSDVVTWTPRPGAVLDLGRMLKDPTDSKGIVEPPEGTKIYKDSWDFGPYLEILNSAVRDEIFCHSSWIKEYFTWAGFKNYNLVVRMIETDEDFSPFPGGYDYLVDFLDLSFPKERPSREHPYEEIHSRVDVIRYVVKNGLLWDDLYIGFQTRLLRDPDIYHHLFWNHFQIKLPLTPPNWKSFLMHCD

SEQ ID NO: 1601 - DNA, 2282 bp, Mus musculus
ggaccctccattctggcagtggcagctgtgaagtctagcgatcttcttctggagagaacagatcagcagggtggagctgggagaggggtagtgttgatgttagacacataatgtgacatcagcctgctctgcatctgtgtctccagaggaacttgaacttcccagctgtactttggtaattgcttctgaaaaaaacctcctggccacacagaaatcaaataaaatttttaatcaagcaaattgaaaaatccaggctgtattataaacatcaattaaaagaagatctgggcctgggccttttgatgtttcctgaccagcttggatgctgtcacctttgtctactcagaagggagtaaaggcagtctaaagtcatcctcgccatcctcgccttcctggtgtgattcgcagaagtagaaagaacaccagcagctgctttgaaataccctggagctggcagatgatggacaggaaacagacagctgagaccctgctgaccctgtctcctgctgaagttgccaacctcaaggaagggatcaatttttttcgaaataagactactgggaaagagtacattttatacaaggagaaggaccatctaaaggcatgcaagaacctctgcaagcaccagggaggcctgttcatgaaagacatcgaggatttagatggaaggtccgttaaatgcacaaagcacaactggaagttagacgtgagcaccatgaaatatatcaaccctccagggagcttctgtcaagacgagctcgttattgaaatggatgaaaacaatgggctttccctggtagaactgaaccctcctaacccctgggactctgatcccaggtctcctgaagaattagcttttggggaagtacagataacatatctcactcatgcctgcatggacctcaagttgggagacaagcgaatggtatttgacccttggttaattggccctgcttttgcccgaggatggtggttgctacatgagcctccatctgactggttggagaggctgtgcaaagcagacctcatttatatcagccacatgcactcagaccacctgagctaccctaccctgaagcagctttcccagagacgaccagacattcccatttatgttggcgacacagaaaggcctgtgttttggaacctggatcagagtggcgtcgggttaactaacatcaacgtggttccatttggaatatggcaacaggtagacaaaagtctgcggttcatgatcttgatggacggcgttcatcctgagatggacacatgcattatcgtggagtacaaaggtcataaaatactcaacacagtggactgcaccagacccaatgggggaaggcttcctgagaaagttgctctaatgatgagtgatttcgcaggaggtgcatcaggctttccaatgactttcagtggtggaaaatttactgaggaatggaaagcccagttcattaaggctgaaagaagaaagcttctgaattacaaagctcagctggtgaaggacctgcagccccgaatctactgtccgtttgctgggtactttgtggagtctcacccatctgacaagtacattaaggaaacaaacaccaaaaatgacccaaatcagctcaacaatcttatcaggaaaaactctgacgtggtgacatggaccccacgacctggcgctgtcctcgaccttggcaggatgctgaaggacccaacagacagcaagggcattgtggagcctccagaggggacaaagatttacaaggattcctgggactttggcccgtacctggagatcttgaattctgctgtcagagatgaaatcttctgtcattcatcctggattaaagagtacttcacgtgggctggatttaagaattacaacctggtggtcaggatgattgaaacagatgaagatttcagcccttttcctggagggtacgactatctggtggactttctagatttatcctttccgaaagaaagacccagccgggagcatccttatgaagaaatccatagccgggtggatgtcatcaggtacgtggtgaagaacggcctgctgtgggatgatctgtatattggattccagacccgattgctgcgggaccctgatatataccatcatctgttttggaatcattttcagataaaactccctctaacaccacccaactggaagtcgttcctaatgcactgtgattagtctggacctggtaagtcccaggaccccagcccagaggatggtgcctgaacattcaagatgggtctcccctgcttcgataaacctttctgga

SEQ ID NO: 1602 - protein, 571 aa, Mus musculus; identical to SEQ ID NO: 1600

SEQ ID NO: 1603 - DNA, 3827 bp, Mus musculus
tgtgaagtctagcgatcttcttctggagagaacagatcagcagggtggagctgggagaggggtagtgttgatgttagacacataatgtgacatcagcctgctctgcatctgtgtctccagaggaacttgaacttcccagctgtactttggtaattgcttctgaaaaaaacctcctggccacacagaaatcaaataaaatttttaatcaagcaaattgaaaaatccaggctgtattataaacatcaattaaaagaagatctgggcctgggccttttgatgtttcctgaccagcttggatgctgtcacctttgtctactcagaagggagtaaaggcagtctaaagtcatcctcgccatcctcgccttcctggtgtgattcgcagaagtagaaagaacaccagcagctgctttgaaataccctggagctggcagatgatggacaggaaacagacagctgagaccctgctgaccctgtctcctgctgaagttgccaacctcaaggaagggatcaatttttttcgaaataagactactgggaaagagtacattttatacaaggagaaggaccatctaaaggcatgcaagaacctctgcaagcaccagggaggcctgttcatgaaagacatcgaggatttagatggaaggtccgttaaatgcacaaagcacaactggaagttagacgtgagcaccatgaaatatatcaaccctccagggagcttctgtcaagacgagctcgttattgaaatggatgaaaacaatgggctttccctggtagaactgaaccctcctaacccctgggactctgatcccaggtctcctgaagaattagcttttggggaagtacagataacatatctcactcatgcctgcatggacctcaagttgggagacaagcgaatggtatttgacccttggttaattggccctgcttttgcccgaggatggtggttgctacatgagcctccatctgactggttggagaggctgtgcaaagcagacctcatttatatcagccacatgcactcagaccacctgagctaccctaccctgaagcagctttcccagagacgaccagacattcccatttatgttggcgacacagaaaggcctgtgttttggaacctggatcagagtggcgtcgggttaactaacatcaacgtggttccatttggaatatggcaacaggtagacaaaagtctgcggttcatgatcttgatggacggcgttcatcctgagatggacacatgcattatcgtggagtacaaagaggaatggaaagcccagttcattaaggctgaaagaagaaagcttctgaattacaaagctcagctggtgaaggacctgcagccccgaatctactgtccgtttgctgggtactttgtggagtctcacccatctgacaagtacattaaggaaacaaacaccaaaaatgacccaaatcagctcaacaatcttatcaggaaaaactctgacgtggtgacatggaccccacgacctggcgctgtcctcgaccttggcaggatgctgaaggacccaacagacagcaagggcattgtggagcctccagaggggacaaagatttacaaggattcctgggactttggcccgtacctggagatcttgaattctgctgtcagagatgaaatcttctgtcattcatcctggattaaagagtacttcacgtgggctggatttaagaattacaacctggtggtcaggatgattgaaacagatgaagatttcagcccttttcctggagggtacgactatctggtggactttctagatttatcctttccgaaagaaagacccagccgggagcatccttatgaagaaatccatagccgggtggatgtcatcaggtacgtggtgaagaacggcctgctgtgggatgatctgtatattggattccagacccgattgctgcgggaccctgatatataccatcatctgttttggaatcattttcagataaaactccctctaacaccacccaactggaagtcgttcctaatgcactgtgattagtctggacctggtaagtcccaggaccccagcccagaggatggtgcctgaacattcaagatgggtctcccctgcttcgataaacctttctggaaacactttcatagacacagccataactaccattattcattggcagtgtcttttattcagagatggcaaacaatgcccccaaatcaagaatttgctcttaaatcttgaacacagcagcagtttataccaaagaagacaagtttctctcagcaatgggcaaacactacatttaagggatgttcacatatgtgcctggtgtgcattgtcgcatagacggactcagaactacttttatcggggctggtgttgtggcttggtagtatagcatgtgcttagagcatatgaggccctgggttccaacacacacacacacacacacacacacacacacacacacacacacctgtataaccctaaattcatcccatgtacactcttgtgcaaggagaaccaaggaaagccaagaatgagctctgcatgggagataaagcctaacagaaggaaaagtgagtgtcagcacagtaggaacaggaaaggaaggctaccagactccagcagcaaaaaagaagaaagctagagaagacatgtgggctgggaggaaggtggggagactagaagaaaatgggaatgagaagatgctgccggtagagagaagaatgtaaaaatggctcttgtgttctttgatagatccgtaccccaggcagctgcaggacaatgttttcagcttttcagagagctcttggcaccatctacttcccatctcactagaaccgaaatgactttgattctgttgtgaaatgtgtcaattaatgaagcccgggggtcctaagagtcttacacgcgttcgccaccggccaggaaagacgcaacaaaccggaatcttctgcggcaaaagctttattgcttacatcttcaggagcaagagagagaatggtgaaaccccgtcccttttaaggagaattatcctccgcctagaacgtgtcgctccctgattggctgcagcccattggccgagttgtcgtcatggggaaggcagagcacatggagtggagaactacccttggcacacgtgcagattatttgtttaccatttagaacacaggatgtcagcgccatcttgtaacggtgaatgtgagggcggctccccacataagagttcaatagatctttgattgatggctcatgagaattgggctgccgactgtaagtcatcaataaattcctttactatctagagactatccataagttctgtgactctagagaaccctgactaatacaactagttaataatcttagggagaaaatatttttaaaatctatagaatattgttgtgtctggccagcagatcacaacctgggttctagcctggaaaggcattttggaaacctggaagagaagaggggctaggcggtgagagaaagaaatgcagctaagacaggcattctgatcaaagctcaattttactgttctgcacgcaattataaagcaggggaagggggcccgattcccgccaattaatcttggggtccaatagcaaggtgaccacgtgcaaggctctgaacagcaaagtggcaggttccagcagtgggcatggcagaatgattgagcaggaagctccacccctgagcaagcaggtttcaggctgggggaggggagactacatctcctccctgttgttaataaaaataaaaaaaaatagaaaaggctggcctgaggcaaaaaatcaatctatgctcaatagtcctgcctgaattcttagggctaaa

SEQ ID NO: 1604 - protein, 529 aa, Mus musculus
MMDRKQTAETLLTLSPAEVANLKEGINFFRNKTTGKEYILYKEKDHLKACKNLCKHQGGLFMKDIEDLDGRSVKCTKHNWKLDVSTMKYINPPGSFCQDELVIEMDENNGLSLVELNPPNPWDSDPRSPEELAFGEVQITYLTHACMDLKLGDKRMVFDPWLIGPAFRWWLLHEPPSDWLERLCKADLIYISHMHSDHLSYPTLKQLSQRRPDIPIYVGDTERPVFWNLDQSGVGLTNINVVPFGIWQQVDKSLRFMILMDGVHPEMDTCIIVEYKEEWKAQFIKAERRKLLNYKAQLVKDLQPRIYCPFAGYFVESHPSDKYIKETNTKNDPNQLNNLIRKNSDVVTWTPRPGAVLDLGRMLKDPTDSKGIVEPPEGTKIYKDSWDFGPYLEILNSAVRDEIFCHSSWIKEYFTWAGFKNYNLVVRMIETDEDFSPFPGGYDYLVDFLDLSFPKERPSREHPYEEIHSRVDVIRYVVKNGLLWDDLYIGFQTRLLRDPDIYHHLFWNHFQIKLPLTPPNWKSFLMHCD

SEQ ID NO: 1605 - DNA, 1292 bp, Mus musculus
tgtgaagtctagcgatcttcttctggagagaacagatcagcagggtggagctgggagaggggtagtgttgatgttagacacataatgtgacatcagcctgctctgcatctgtgtctccagaggaacttgaacttcccagctgtactttggtaattgcttctgaaaaaaacctcctggccacacagaaatcaaataaaatttttaatcaagcaaattgaaaaatccaggctgtattataaacatcaattaaaagaagatctgggcctgggccttttgatgtttcctgaccagcttggatgctgtcacctttgtctactcagaagggagtaaaggcagtctaaagtcatcctcgccatcctcgccttcctggtgtgattcgcagaagtagaaagaacaccagcagctgctttgaaataccctggagctggcagatgatggacaggaaacagacagctgagaccctgctgaccctgtctcctgctgaagttgccaacctcaaggaagggatcaatttttttcgaaataagactactgggaaagagtacattttatacaaggagaaggaccatctaaaggcatgcaagaacctctgcaagcaccagggaggcctgttcatgaaagacatcgaggatttagatggaaggtccgttaaatgcacaaagcacaactggaagttagacgtgagcaccatgaaatatatcaaccctccagggagcttctgtcaagacgagctcgttattgaaatggatgaaaacaatgggctttccctggtagaactgaaccctcctaacccctgggactctgatcccaggtctcctgaagaattagcttttggggaagtacagataacatatctcactcatgcctgcatggacctcaagttgggagacaagcgaatggtatttgacccttggttaattggccctgcttttgcccgaggatggtggttgctacatgagcctccatctgactggttggagaggctgtgcaaagcagacctcatttatatcagccacatgcactcagaccacctgaggtaaagaagtcacatacccaactcctaagataacaatggcaacagtgggatctttgggttgttgctttgtttcttagacaggatcttatgatgttcaggctggccttgaactcactatgtagttgaggatgagaattcctgcctgctggttatactgccacttccaaatactgggattatagacatgtgccactacgctctgtttataaaacatttttgggtgcttctgcactctgacttgtaccataggactatg

SEQ ID NO: 1606 - protein, 200 aa, Mus musculus
MMDRKQTAETLLTLSPAEVANLKEGINFFRNKTTGKEYILYKEKDHLKACKNLCKHQGGLFMKDIEDLDGRSVKCTKHNWKLDVSTMKYINPPGSFCQDELVIEMDENNGLSLVELNPPNPWDSDPRSPEELAFGEVQITYLTHACMDLKLGDKRMVFDPWLIGPAFRWWLLHEPPSDWLERLCKADLIYISHMHSDHLR
